(19) United States
(12) Patent Application Publication
(10) Pub. No.: US 2021/0139892 A1
(43) Pub. Date: May 13, 2021

(54) COMPOSITIONS AND METHODS FOR DELIVERY OF RNA TO A CELL

(71) Applicant: The Regents of the University of California, Oakland, CA (US)

(72) Inventors: Ross Crawford Wilson, Berkeley, CA (US); Colleen Amanda McGourty, Berkeley, CA (US); Lorena de Oñate Monje, Berkeley, CA (US)

(21) Appl. No.: 17/253,536

(22) PCT Filed: Jul. 2, 2019
(86) PCT No.: PCT/US19/40301

§ 371 Date: Dec. 17, 2020

Related U.S. Application Data
(60) Provisional application No. 62/694,212, filed on Jul. 5, 2018.

(51) Int. Cl. C12N 15/11; C12N 9/22

(52) U.S. Cl. CPC C12N 15/11; C12N 9/22; C12N 2320/30; C12N 2310/3513; C12N 2310/20

(57) ABSTRACT

The present disclosure provides a system comprising: a) a modified RNA-binding protein (RBP) comprising: i) an RBP; and ii) one or more endosomolytic peptides (ELPs) covalently linked, directly or via a linker, to the RBP; and b) a modified cargo RNA complexed to the RBP, wherein the modified cargo RNA comprises a cargo RNA modified to include one or more RBP binding sites that are bound by the RBP present in the modified RBP. The present disclosure also provides a method of delivering a cargo RNA to a eukaryotic cell, the method comprising contacting the cell with the system of the present disclosure. The present disclosure provides methods of delivering a cargo RNA to the cytoplasm of a cell. The present disclosure provides methods of delivering a cargo RNA to the cytosol of a cell.

### CROSS-REFERENCE

[0001] This application claims the benefit of U.S. Provisional Patent Application No. 62/694,212, filed Jul. 5, 2018, which application is incorporated herein by reference in its entirety.

### INCORPORATION BY REFERENCE OF SEQUENCE LISTING PROVIDED AS A TEXT FILE

[0002] A Sequence Listing is provided herewith as a text file, “BERK-386WO_SEQ_LISTING ST25.txt” created on Jul. 1, 2019 and having a size of 7,676 KB. The contents of the text file are incorporated by reference herein in their entirety.

### INTRODUCTION

[0003] RNA-guided endonuclease (RGEN) technology has enabled precise alteration of the genome in living cells, a process known as genome editing. RGEN-enabled genome editing has rapidly transformed biomedical research and holds immense promise for the treatment, prevention, or curing of genetic disease as well as infectious disease. However, translating genome editing into effective medical therapies is limited by the ability to deliver RNA-guided CRISPR/Cas effector proteins, such as RGEN enzymes, to tissue in an effective, safe, and non-toxic manner.

[0004] One approach for tissue-specific delivery of RNA-guided CRISPR/Cas effector proteins is to co-localize them with an agent that promotes endocytosis. Such a strategy has been used to carry out tissue-specific uptake of cytotoxic anti-cancer drugs coupled to receptor-specific antibodies (Lambert et al., Adv. Ther. 2017; 34(5): 1015-1035), as well as tissue-targeted delivery of therapeutic siRNA (Willoughby et al., Mol Ther. 2018; 26(1); 105-114). However, tissue-specific endocytosis represents only the first step for receptor-facilitated macromolecular delivery. The second step is to promote escape of the macromolecular cargo from the endosome. Without endosomal escape, the macromolecular cargo is trafficked to the lysosome, where it is degraded before it has the opportunity to take therapeutic action within the cell. Various reagents, such as chloroquine, polyethyleneimine, certain highly charged cationic compounds, cell penetrating peptides (CPPs), and inactivated adenoviruses, have been developed that are intended to quickly disrupt the endosome in order to minimize the amount of time that a delivered bioactive agent spends in the endosome-like environment. However, these agents often lack generality and present suboptimal ability to promote endosomal escape of the cargo and are associated with various disadvantages, including toxicity problems. The challenge of efficient and non-toxic endosomal escape has been a substantial barrier in the delivery of macromolecular therapeutics (Varkouhi et al., Journal of Controlled Release 2011; 151(3); 220-228), especially for in vivo applications.

[0005] Another approach to the RNA-guided CRISPR/Cas effector protein delivery and internalization involve adeno-associated virus, liposomes, or lipid nanoparticles. These methods are limited in their efficacy because they are based on non-tissue-specific association with the cell surface and as such will be internalized by many cell types.

[0006] Thus, there is a need in the art for compositions and methods for delivering RNA-guided CRISPR/Cas effector proteins to cells, where such effector proteins may be complexed with guide RNA.

### SUMMARY

[0007] The present disclosure provides a system comprising: a) a modified RNA-binding protein (RBP) comprising: i) an RBP; and ii) one or more endosomolytic peptides (ELPs) covalently linked, directly or via a linker, to the RBP; and b) a modified cargo RNA complexed to the RBP, wherein the modified cargo RNA comprises a cargo RNA modified to include one or more RBP binding sites that are bound by the RBP present in the modified RBP. The present disclosure also provides a method of delivering a cargo RNA to a eukaryotic cell, the method comprising contacting the cell with the system of the present disclosure. The present disclosure provides methods of delivering a cargo RNA to the cytoplasm of a cell. The present disclosure provides methods of delivering a cargo RNA to the cytosol of a cell.

### BRIEF DESCRIPTION OF THE DRAWINGS

[0008] FIG. 1 provides the amino acid sequences for U1A construct mutations.

[0009] FIG. 2 illustrates features of a system of the present disclosure, including: the protein component of a ribonucleoprotein (RNP); a modified cargo RNA that includes binding sites which are recognized by a corresponding RBP component; and RBPs that have been chemically conjugated to an endosomolytic agent (ELA), e.g., an endosomolytic peptide (ELP).

[0010] FIG. 3 illustrates an example of the subject system including: a) a CRISPR/Cas effector polypeptide (e.g., Cas9); a Cas9 single-guide RNA (sgRNA) modified to contain three RNA-based binding sites for the RBP domain U1A; and U1A polypeptides that have been covalently conjugated to an ELA (e.g., an ELP).

[0011] FIG. 4 illustrates EMX1 editing results in HEPG2 cells, which were treated with a positive control for each RNP construct (“noSL” conditions), and RNPs containing various sgRNA designs capable of recruiting various numbers of U1A RBP adaptor molecules to their engineered U1A binding sites, wherein the U1A RBP adaptor molecules include 1, 2, or 3 covalently bound ELPs (labelled “ELA” in the figure).

[0012] FIG. 5A-5F provides amino acid sequences of Streptococcus pyogenes Cas9 (FIG. 5A) and variants of Streptococcus pyogenes Cas9 (FIG. 5B-5F).

[0013] FIG. 6 provides an amino acid sequence of Staphylococcus aureus Cas9.

[0014] FIG. 7A-7C provide amino acid sequences of Francisella tularensis Cpf1 (FIG. 7A), Acidaminococcus sp. BV3L6 Cpf1 (FIG. 7B), and a variant Cpf1 (FIG. 7C).

[0015] FIG. 8 depicts a sodium dodecyl sulfate-polyacrylamide gel electrophoresis (SDS-PAGE) gel, showing the mobility of U1A and its derivatives that have been conjugated with the pyridyl disulfide-functionalized variant of the ppTG21 peptide.

[0016] FIG. 9 depicts a trace from mass spectrometry analysis of U1A variants, where the variants are conjugated with one, two, or three chains of ppTG21.

[0017] FIGS. 10A-10B depict the strategy and results for guide RNA production.

[0018] FIGS. 11A-11B depict mass spectrometry traces of guide RNAs.

[0019] FIGS. 12A-12B are graphs from fluorescence polarization (FP) binding assays

[0020] FIGS. 13A-13B are graphs from FP binding assays testing for affinity between adaptor protein U1A and different guide RNA constructs.

[0021] FIG. 14 is a trace from a biolayer interferometry (BLI) experiment, showing the absence of substantial binding between U1A and a Cas9 RNP containing an unmodified guide RNA (noSL).

[0022] FIGS. 15A-15D depict a trace from a biolayer interferometry (BLI) results demonstrating persisting binding between U1A and a Cas9 RNP containing an engineered guide RNA bearing three binding sites for the U1A adaptor (noSL).

[0023] FIGS. 16A-16E depict a graph demonstrating receptor-mediated genome editing of the EMX1 gene via adaptor-recruited endosomolytic peptides (arELP) bound to Cas9 RNP.

### DEFINITIONS

[0024] The terms “polynucleotide” and “nucleic acid,” used interchangeably herein, refer to a polymeric form of nucleotides of any length, either ribonucleotides or deoxynucleotides. Thus, this term includes, but is not limited to, single-, double-, or multi-stranded DNA or RNA, genomic DNA, cDNA, DNA-RNA hybrids, or a polymer comprising purine and pyrimidine bases or other natural, chemically or biochemically modified, non-natural, or derivatized nucleotide bases. The terms “polynucleotide” and “nucleic acid” should be understood to include, as applicable to the embodiment being described, single-stranded (such as sense or antisense) and double-stranded polynucleotides.

[0025] The terms “polypeptide,” “peptide,” and “protein”, are used interchangeably herein, refer to a polymeric form of amino acids of any length, which can include genetically coded and non-genetically coded amino acids, chemically or biochemically modified or derivatized amino acids, and polypeptides having modified peptide backbones. The term includes fusion proteins, including, but not limited to, fusion proteins with a heterologous amino acid sequence, fusions with heterologous and homologous leader sequences, with or without N-terminal methionine residues; immunologically tagged proteins; and the like.

[0026] The terms “antibodies” and “immunoglobulin” include antibodies or immunoglobulins of any isotype, fragments of antibodies that retain specific binding to antigen, including, but not limited to, Fab, Fv, single-chain Fv (scFv), and Fd fragments, chimeric antibodies, humanized antibodies, single-chain antibodies (scAb), single domain antibodies (dAb), single domain heavy chain antibodies, single domain light chain antibodies, nanobodies, bi-specific antibodies, and multi-specific antibodies.

[0027] The term “analog” of an amino acid residue refers to a residue having a sidechain group that is a structural and/or functional analog of the sidechain group of the reference amino acid residue. In some instances, the amino acid analogs share backbone structures, and/or the side chain structures of one or more natural amino acids, with difference(s) being one or more modified groups in the molecule. Such modification may include, but is not limited to, substitution of an atom (such as N) for a related atom (such as S), addition of a group (such as methyl, or hydroxyl, etc.) or an atom (such as F, Cl or Br, etc.), deletion of a group, substitution of a covalent bond (single bond for double bond, etc.), or combinations thereof. For example, amino acid analogs may include α-hydroxy acids, and α-amino acids, and the like. In some cases, an analog of an amino acid residue is a substituted version of the amino acid. The term “substituted version” of an amino acid residue refers to a residue having a sidechain group that includes one or more additional substituents on the sidechain group that are not present in the sidechain of the reference amino acid residue.

[0028] The terms “heterocyclic amino acid” and “heterocyclic residue” are used interchangeably to refer to an amino acid residue where the sidechain group includes a heterocyclic group, such as a heteroaryl group or a saturated heterocyclic group. In some cases, the sidechain group is a heterocycle-alkyl or a substituted heterocycle-alkyl group. The terms are meant to include naturally occurring and non-naturally occurring alpha-amino acids. Naturally occurring heterocyclic residues of interest include tryptophan and histidine. In some cases, the amino acid group is “pH responsive”. The term “pH responsive,” as used herein, refers to an amino acid whose side chain is responsive to the local pH such that the side chain is differentially protonated under select conditions. pH responsiveness is dependent on the pKa of the amino acid. Non-limiting examples include histidine (pKa˜6.0) and glutamic acid (pKa˜4.5). pH responsive amino acids are often found in endosomolytic peptides.

[0029] The terms “non-polar amino acid residue” and “non-polar residue” refer to an amino acid residue that includes a sidechain that is hydrogen (i.e., G) or a non-polar group. In some cases, a non-polar amino acid sidechain is a hydrophobic group. The terms are meant to include naturally occurring and non-naturally occurring alpha-amino acids. Naturally occurring non-polar amino acid residues of interest include naturally occurring hydrophobic residues.

[0030] The terms “hydrophobic amino acid” and “hydrophobic residue” are used interchangeably to refer to an amino acid residue where the sidechain group is a hydrophobic group. The terms are meant to include naturally occurring and non-naturally occurring alpha-amino acids. Naturally occurring hydrophobic residues of interest include alanine, isoleucine, leucine, phenylalanine, proline and valine.

[0031] The terms “polar amino acid” and “polar residue” are used interchangeably to refer to an amino acid residue where the sidechain group includes a polar group or charged group. In certain cases, the polar group is capable of being a hydrogen bond donor or acceptor. The terms are meant to include naturally occurring and non-naturally occurring alpha-amino acids. Naturally occurring polar residues of interest include arginine, asparagine, aspartic acid, histidine, lysine, serine, threonine, tyrosine, cysteine, methionine, glutamic acid, glutamine and tryptophan.

[0032] In some cases, a polar amino acid group is a cationic amino acid group. The term “cationic amino acid” refers to a positively charged amino acid. Particular examples include but are not limited to, lysine, arginine and histidine.

[0033] The terms “scaffold” and “scaffold domain” are used interchangeably and refer to a reference RBP motif from which a subject RBP arose, or against which the subject RBP is able to be compared, e.g., via a sequence or structural alignment method. The structural motif of a scaffold domain can be based on a naturally occurring protein domain structure. For a particular protein domain structural motif, several related underlying sequences may be available, any one of which can provide for the particular three-dimensional structure of the scaffold domain.

[0034] The terms “parent amino acid sequence,” “parent sequence,” and “parent polypeptide” refer to a polypeptide comprising an amino acid sequence from which a variant peptidic compound arose and against which the variant peptidic compound is being compared. The parent polypeptide lacks one or more of the modifications or variant amino acids disclosed herein and can differ in function compared to a variant peptidic compound as disclosed herein.

[0035] The terms “corresponding residue” and “residue corresponding to” are used to refer to an amino acid residue located at equivalent positions of variant and parent sequences.

[0036] As used herein, the terms “variant amino acid” and “variant residue” are used interchangeably to refer to the particular residues of a subject compound which are modified or mutated by comparison to an underlying scaffold domain. The variant residues encompass those residues that were selected (e.g., via mirror image screening, affinity maturation and/or point mutation(s)) to provide for a desirable domain motif structure that specifically binds to the target. When a compound includes amino acid mutations or modifications at particular positions by comparison to a scaffold domain, the amino acid residues of the peptidic compound located at those particular positions are referred to as “variant amino acids.” Such variant amino acids may confer on the resulting peptidic compounds different functions, such as specific binding to a target protein, increased water solubility, ease of chemical synthesis, metabolic stability, etc.

[0037] The terms “variant domain” and “variant motif” refers to an arrangement of variant amino acids incorporated at particular locations of a scaffold domain. The variant motif can encompass a continuous and/or a discontinuous sequence of residues. The variant motif can encompass variant amino acids located at one face of the compound structure. The variant domain may be considered to be incorporated into, or integrated with, an underlying scaffold domain structure or sequence. In the subject compounds, the scaffold domain can provide a stable three-dimensional protein structural motif, e.g., of a naturally occurring protein domain, while the variant domain can be defined by an arrangement of characteristic minimum number of variant residues at a modified surface of the structure that is capable of specifically binding a target protein.

[0038] The term “mutation” refers to a deletion, insertion, or substitution of an amino acid(s) residue or nucleotide(s) residue relative to a reference sequence, such as a scaffold sequence.

[0039] A “modified” protein refers to herein as a protein that has been altered to differ from the protein in its original form. Non-limiting examples of modifications of proteins may include incorporation of amino acid analogs, deletion and/or insertion of amino acids in the primary sequence of the protein, incorporation of chemical moieties (e.g. addition of small chemical groups such as methyl or hydroxyls and/or linkage to large moieties such as PEGylation chains or other large chemical structures), and conjugation (e.g., directly or via a linker) to a second molecule, e.g., fusion with another protein as compared to the protein in its original form.

[0040] The term “domain” refers to a continuous or discontinuous sequence of amino acid residues. A domain can include one or more regions or segments. The terms “region” and “segment” are used interchangeably to refer to a continuous sequence of amino acid residues that, in some cases, can define a particular secondary structural feature.

[0041] The term “naturally-occurring” as used herein as applied to a nucleic acid, a protein, a cell, or an organism, refers to a nucleic acid, cell, protein, or organism that is found in nature.

[0042] As used herein the term “isolated” is meant to describe a polynucleotide, a polypeptide, or a cell that is in an environment different from that in which the polynucleotide, the polypeptide, or the cell naturally occurs. An isolated genetically modified host cell may be present in a mixed population of genetically modified host cells.

[0043] “Heterologous,” as used herein, refers to a nucleotide or amino acid sequence that is not found in the native nucleic acid or protein, respectively. For example, relative to a Cas9 polypeptide, a heterologous polypeptide comprises an amino acid sequence from a protein other than the Cas9 polypeptide.

[0044] “Recombinant,” as used herein, means that a particular nucleic acid (DNA or RNA) is the product of various combinations of cloning, restriction, and/or ligation steps resulting in a construct having a structural coding or non-coding sequence distinguishable from endogenous nucleic acids found in natural systems. Generally, nucleotide sequences encoding the structural coding sequence can be assembled from cDNA fragments and short oligonucleotide linkers, or from a series of synthetic oligonucleotides, to provide a synthetic nucleic acid which is capable of being expressed from a recombinant transcriptional unit contained in a cell or in a cell-free transcription and translation system. Such sequences can be provided in the form of an open reading frame uninterrupted by internal non-translated sequences, or introns, which are typically present in eukaryotic genes. Genomic DNA comprising the relevant nucleotide sequences can also be used in the formation of a recombinant gene or transcriptional unit. Sequences of non-translated DNA may be present 5′ or 3′ from the open reading frame, where such sequences do not interfere with manipulation or expression of the coding regions, and may indeed act to modulate production of a desired product by various mechanisms (see “DNA regulatory sequences”, below).

[0045] Thus, e.g., the term “recombinant” polynucleotide or “recombinant” nucleic acid refers to one which is not naturally occurring, e.g., is made by the artificial combination of two otherwise separated segments of sequence through human intervention. This artificial combination is often accomplished by either chemical synthesis means, or by the artificial manipulation of isolated segments of nucleic acids, e.g., by genetic engineering techniques. Such artificial combination can be carried out to join together nucleic acid segments of desired functions to generate a desired combination of functions.

[0046] Similarly, the term “recombinant” polypeptide refers to a polypeptide which is not naturally occurring, e.g., is made by the artificial combination of two otherwise separated segments of amino acid sequence through human intervention. Thus, e.g., a polypeptide that comprises a heterologous amino acid sequence is recombinant.

[0047] By “construct” or “vector” is meant a recombinant nucleic acid, generally recombinant DNA, which has been generated for the purpose of the expression and/or propagation of a specific nucleotide sequence(s), or is to be used in the construction of other recombinant nucleotide sequences.

[0048] The terms “DNA regulatory sequences,” “control elements,” and “regulatory elements,” used interchangeably herein, refer to transcriptional and translational control sequences, such as promoters, enhancers, polyadenylation signals, terminators, protein degradation signals, and the like, that provide for and/or regulate expression of a coding sequence and/or production of an encoded polypeptide in a host cell.

[0049] The term “transformation” is used interchangeably herein with “genetic modification” and refers to a permanent or transient genetic change induced in a cell following introduction of new nucleic acid (e.g., DNA exogenous to the cell) into the cell. Genetic change (“modification”) can be accomplished either by incorporation of the new nucleic acid into the genome of the host cell, or by transient or stable maintenance of the new nucleic acid as an episomal element. Where the cell is a eukaryotic cell, a permanent genetic change can be achieved by introduction of new DNA into the genome of the cell. In prokaryotic cells, permanent changes can be introduced into the chromosome or via extrachromosomal elements such as plasmids and expression vectors, which may contain one or more selectable markers to aid in their maintenance in the recombinant host cell. Suitable methods of genetic modification include viral infection, transfection, conjugation, protoplast fusion, electroporation, particle gun technology, calcium phosphate precipitation, direct microinjection, and the like. The choice of method is generally dependent on the type of cell being transformed and the circumstances under which the transformation is taking place (i.e. in vitro, ex vivo, or in vivo). A general discussion of these methods can be found in Ausubel, et al, Short Protocols in Molecular Biology, 3rd ed., Wiley & Sons, 1995.

[0050] “Operably linked” refers to a juxtaposition wherein the components so described are in a relationship permitting them to function in their intended manner. For instance, a promoter is operably linked to a coding sequence if the promoter affects its transcription or expression. As used herein, the terms “heterologous promoter” and “heterologous control regions” refer to promoters and other control regions that are not normally associated with a particular nucleic acid in nature. For example, a “transcriptional control region heterologous to a coding region” is a transcriptional control region that is not normally associated with the coding region in nature.

[0051] A “host cell,” as used herein, denotes an in vivo or in vitro eukaryotic cell, a prokaryotic cell, or a cell from a multicellular organism (e.g., a cell line) cultured as a unicellular entity, which eukaryotic or prokaryotic cells can be, or have been, used as recipients for a nucleic acid (e.g., an expression vector), and include the progeny of the original cell which has been genetically modified by the nucleic acid. In some cases, a host cell is present in vivo within an organism. Non-limiting examples of a host cell in vivo within an organism include a liver cell, a blood cell, a muscle cell, or the like within an organ or tissue of the organism. It is understood that the progeny of a single cell may not necessarily be completely identical in morphology or in genomic or total DNA complement as the original parent, due to natural, accidental, or deliberate mutation. A “recombinant host cell” (also referred to as a “genetically modified host cell”) is a host cell into which has been introduced a heterologous nucleic acid, e.g., an expression vector. For example, a eukaryotic host cell is a genetically modified eukaryotic host cell, by virtue of introduction into a suitable eukaryotic host cell of a heterologous nucleic acid, e.g., an exogenous nucleic acid that is foreign to the eukaryotic host cell, or a recombinant nucleic acid that is not normally found in the eukaryotic host cell.

[0052] The term “conservative amino acid substitution” refers to the interchangeability in proteins of amino acid residues having similar side chains. For example, a group of amino acids having aliphatic side chains consists of glycine, alanine, valine, leucine, and isoleucine; a group of amino acids having aliphatic-hydroxyl side chains consists of serine and threonine; a group of amino acids having amide-containing side chains consists of asparagine and glutamine; a group of amino acids having aromatic side chains consists of phenylalanine, tyrosine, and tryptophan; a group of amino acids having basic side chains consists of lysine, arginine, and histidine; and a group of amino acids having sulfur-containing side chains consists of cysteine and methionine. Exemplary conservative amino acid substitution groups are: valine-leucine-isoleucine, phenylalanine-tyrosine, lysine-arginine, alanine-valine, and asparagine-glutamine.

[0053] A polynucleotide or polypeptide has a certain percent “sequence identity” to another polynucleotide or polypeptide, meaning that, when aligned, that percentage of bases or amino acids are the same, and in the same relative position, when comparing the two sequences. Sequence similarity can be determined in a number of different manners. To determine sequence identity, sequences can be aligned using the methods and computer programs, including BLAST, available over the world wide web at ncbi.nlm.nih.gov/BLAST. See, e.g., Altschul et al. (1990), J. Mol. Biol. 215:403-10. Another alignment algorithm is FASTA, available in the Genetics Computing Group (GCG) package, from Madison, Wis., USA, a wholly owned subsidiary of Oxford Molecular Group, Inc. Other techniques for alignment are described in Methods in Enzymology, vol. 266: Computer Methods for Macromolecular Sequence Analysis (1996), ed. Doolittle, Academic Press, Inc., a division of Harcourt Brace & Co., San Diego, Calif., USA. Of particular interest are alignment programs that permit gaps in the sequence. The Smith-Waterman is one type of algorithm that permits gaps in sequence alignments. See Meth. Mol. Biol. 70: 173-187 (1997). Also, the GAP program using the Needleman and Wunsch alignment method can be utilized to align sequences. See J. Mol. Biol. 48: 443-453 (1970).

[0054] Any convenient linking groups can be utilized in the subject systems. The terms “linker”, “linkage” and “linking group” are used interchangeably and refer to a linking moiety that covalently connects two or more compounds. In some cases, the linker is divalent. In certain cases, the linker is a branched or trivalent linking group. In some cases, the linker has a linear or branched backbone of 200 atoms or less (such as 100 atoms or less, 80 atoms or less, 60 atoms or less, 50 atoms or less, 40 atoms or less, 30 atoms or less, or even 20 atoms or less) in length. A linking moiety may be a covalent bond that connects two groups or a linear or branched chain of between 1 and 200 atoms in length, for example of about 1, 2, 3, 4, 5, 6, 8, 10, 12, 14, 16, 18, 20, 30, 40, 50, 100, 150 or 200 carbon atoms in length, where the linker may be linear, branched, cyclic or a single atom. In certain cases, one, two, three, four or five or more carbon atoms of a linker backbone may be optionally substituted with a sulfur, nitrogen or oxygen heteroatom. In certain instances, when the linker includes a PEG group, every third atom of that segment of the linker backbone is substituted with an oxygen. The bonds between backbone atoms may be saturated or unsaturated, usually not more than one, two, or three unsaturated bonds will be present in a linker backbone. The linker may include one or more substituent groups, for example an alkyl, aryl or alkenyl group. A linker may include, without limitations, oligo(ethylene glycol), ethers, thioethers, disulfide, amides, carbonates, carbamates, tertiary amines, alkyls, which may be straight or branched, e.g., methyl, ethyl, n-propyl, 1-methylethyl (iso-propyl), n-butyl, n-pentyl, 1,1-dimethylethyl (t-butyl), and the like. The linker backbone may include a cyclic group, for example, an aryl, a heterocycle or a cycloalkyl group, where 2 or more atoms, e.g., 2, 3 or 4 atoms, of the cyclic group are included in the backbone. A linker may be cleavable or non-cleavable. A linker may be peptidic, e.g., a linking sequence of residues.

[0055] As used herein, the term “cleavable linker” refers to a linker that can be selectively cleaved to produce two products. Application of suitable cleavage conditions to a molecule containing a cleavable linker that is cleaved by the cleavage conditions will produce two byproducts. A cleavable linker of the present disclosure is stable, e.g. to physiological conditions, until it is contacted with a cleavage-inducing stimulus, e.g., an agent such as an enzyme or other cleavage-inducing agent or stimulus such as chemical agent, irradiation with light and/or heat. In some cases, the cleavable linker is photocleavable, i.e., cleavable upon irradiation with light of a suitable wavelength. In some cases, the cleavable linker is thermally cleavable, i.e., cleavable upon heating to a suitable temperature. Exemplary conditions are set forth below.

[0056] Before the present invention is further described, it is to be understood that this invention is not limited to particular embodiments described, as such may, of course, vary. It is also to be understood that the terminology used herein is for the purpose of describing particular embodiments only, and is not intended to be limiting, since the scope of the present invention will be limited only by the appended claims.

[0057] Where a range of values is provided, it is understood that each intervening value, to the tenth of the unit of the lower limit unless the context clearly dictates otherwise, between the upper and lower limit of that range and any other stated or intervening value in that stated range, is encompassed within the invention. The upper and lower limits of these smaller ranges may independently be included in the smaller ranges, and are also encompassed within the invention, subject to any specifically excluded limit in the stated range. Where the stated range includes one or both of the limits, ranges excluding either or both of those included limits are also included in the invention.

[0058] Unless defined otherwise, all technical and scientific terms used herein have the same meaning as commonly understood by one of ordinary skill in the art to which this invention belongs. Although any methods and materials similar or equivalent to those described herein can also be used in the practice or testing of the present invention, the preferred methods and materials are now described. All publications mentioned herein are incorporated herein by reference to disclose and describe the methods and/or materials in connection with which the publications are cited.

[0059] It must be noted that as used herein and in the appended claims, the singular forms “a,” “an,” and “the” include plural referents unless the context clearly dictates otherwise. Thus, for example, reference to “a guide RNA” includes a plurality of such guide RNAs and reference to “the RNA-guided CRISPR/Cas effector protein” includes reference to one or more RNA-guided CRISPR/Cas effector proteins and equivalents thereof known to those skilled in the art, and so forth. It is further noted that the claims may be drafted to exclude any optional element. As such, this statement is intended to serve as antecedent basis for use of such exclusive terminology as “solely,” “only” and the like in connection with the recitation of claim elements, or use of a “negative” limitation.

[0060] It is appreciated that certain features of the invention, which are, for clarity, described in the context of separate embodiments, may also be provided in combination in a single embodiment. Conversely, various features of the invention, which are, for brevity, described in the context of a single embodiment, may also be provided separately or in any suitable sub-combination. All combinations of the embodiments pertaining to the invention are specifically embraced by the present invention and are disclosed herein just as if each and every combination was individually and explicitly disclosed. In addition, all sub-combinations of the various embodiments and elements thereof are also specifically embraced by the present invention and are disclosed herein just as if each and every such sub-combination was individually and explicitly disclosed herein.

[0061] The publications discussed herein are provided solely for their disclosure prior to the filing date of the present application. Nothing herein is to be construed as an admission that the present invention is not entitled to antedate such publication by virtue of prior invention. Further, the dates of publication provided may be different from the actual publication dates which may need to be independently confirmed.

### DETAILED DESCRIPTION

[0062] The present disclosure provides systems and methods for delivery of an RNA cargo to the cytoplasm of a eukaryotic cell. The present disclosure provides systems and methods for delivery of an RNA cargo to the cytosol of a eukaryotic cell. The present disclosure provides systems and methods for delivery of an RNA cargo from the cytosol to the nucleus of a eukaryotic cell. The present disclosure provides a system comprising: a) a modified RNA-binding protein (RBP) comprising: i) an RBP; and ii) one or more endosomolytic peptides covalently linked, directly or via a linker, to the RBP; and b) a modified cargo RNA complexed to the RBP, wherein the modified cargo RNA comprises a cargo RNA that is modified to include one or more RBP binding sites that are bound by the RBP present in the modified RBP. The present disclosure provides a system comprising: a) a modified RBP comprising: i) an RBP; and ii) one or more cell penetrating peptides and/or endosomolytic peptides covalently linked, directly or via a linker, to the RBP; and b) a modified cargo RNA complexed to the RBP, wherein the modified cargo RNA comprises a cargo RNA that is modified to include one or more RBP binding sites that are bound by the RBP present in the modified RBP. The present disclosure also provides a method of delivering a cargo RNA to a eukaryotic cell, the method comprising contacting the cell with the system of the present disclosure.

### System

[0063] The present disclosure provides systems for delivery of a cargo RNA to the cytoplasm (e.g., to the cytosol and/or to an intracellular organelle such as the nucleus) of a eukaryotic cell. The subject systems are useful for facilitating controlled tissue-specific delivery of a cargo RNA. A system of the present disclosure can induce endocytosis of the system by a eukaryotic cell and subsequent endosomal escape to the cytoplasm (e.g., to the cytosol). In some cases, a system of the present disclosure includes: i) a modified cargo RNA comprising a cargo RNA that is modified to include one or more binding sites for an RNA-binding protein (RBP); and ii) a modified RBP complexed to the binding sites in the cargo RNA, wherein the RBP has been modified by covalently linking one or more endosomolytic peptides (ELPs) to one or more locations in the RBP. In some cases, a system of the present disclosure includes: i) a modified cargo RNA comprising a cargo RNA that is modified to include one or more binding sites for an RBP; and ii) a modified RBP complexed to the binding sites in the cargo RNA, wherein the RBP has been modified by covalently linking one or more cell penetrating peptides (CPPs) and/or ELPs to one or more locations in the RBP. In some cases, the ELP is covalently bonded directly to the RBP of interest. In other cases, the ELP is covalently bonded to the RBP via a linker, such as an acid-labile or a reduction-labile linker to facilitate timely release of the ELP once the cargo is inside the endosome. In some cases, the modified cargo RNA comprises a guide RNA that is modified to include one or more binding sites for the RBP portion of the modified RBP. In some cases, the system includes an RNA-guided CRISPR/Cas effector protein, where the RNA-guided CRISPR/Cas effector protein is complexed with the modified guide RNA. It is understood that any convenient RNA sequence that has been engineered to include sequences that are capable of recruiting RBPs that have been covalently modified with ELPs can be utilized in the subject systems.

[0064] As disclosed herein the ELPs include polypeptide sequences capable of promoting transit of co-localized macromolecular cargo from the endosome (or other cellular compartment) to the cytosol. In some cases, ELPs comprise about 5 to about 60 amino acid residues. In certain cases, ELPs comprise about 20 to about 25 amino acid residues. In some cases, the ELPs are rich in histidine residues. Any convenient ELP capable of promoting transit of co-localized macromolecular cargo from the endosome to the cytosol can be used in the present systems. It will be understood that ELPs are distinct from “cell penetrating peptides” (CPPs), which promote internalization from the cell exterior to the cytosol. By contrast to CPPs, ELPs promote endosomal escape, a process following endocytosis that prevents cargo from being trafficked to the lysosome for rapid degradation.

[0065] As disclosed herein, the ELP is covalently bound either directly or indirectly via a linker to the RBP of interest. It will be understood that conjugation of the ELP to the RBP may be achieved by any convenient methodology. In certain cases, the conjugation of the ELP to the RBP is performed using disulfide chemistry at cysteine residues that are not naturally occurring but have been incorporated in the RBP and ELP at sites of intended modification. The subject RBP is chosen to give this system the versatility to co-localize a precise number of ELPs to the cargo RNA complex. Through the variable number of RBP binding sites in the cargo RNA as well as the variable number of ELPs conjugated to the RBP itself, the system permits control of the number of endosomal escape-promoting polypeptides being co-localized with the cargo RNA. Such versatility will allow systems to be identified and developed so as to achieve the correct balance between effective endosomal escape (more polypeptides) and safety/specificity (fewer peptides). The number and/or identity of ELPs utilized in the system will depend on the cargo RNA being delivered and/or the tissue to which the cargo RNA is being delivered. The flexibility and modularity of the subject system allows it to be quickly adapted for multiple biomedical applications.

[0066] The subject systems provide a means of imparting a cargo RNA with the ability to escape the endosomes of mammalian cells by co-localizing it with a precisely controlled number of ELPs. This will facilitate development of cargo RNA-based therapeutics, which currently lack methods of delivery that are effective and tissue specific.

[0067] Accordingly, in some cases, the present disclosure provides a system comprising: a) a modified RNA-binding protein (RBP) comprising: i) an RBP; and ii) one or more endosomolytic peptides covalently linked, directly or via a linker, to the RBP; and b) a modified cargo RNA complexed to the RBP, wherein the modified cargo RNA comprises a cargo RNA that is modified to include one or more RBP binding sites that are bound by the RBP present in the modified RBP.

[0068] In some cases, the system is described by the formula:

A(X-(L-Z)ₙ)ₘ

[0069] wherein, A is a cargo RNA modified to include one or more binding sites for complexing to one or more modified RBPs represented by (X-(L-Z)ₙ)ₘ; X is an RBP of interest (e.g., as described herein); L is an optional linking group (e.g., as described herein); Z is an ELP of interest (e.g., as described herein); and n and m are each independently an integer from 1 to 10. In some cases, the cargo RNA (A) comprises one or more binding sites for complexing a modified RBP, such that m is 1, 2, 3, 4, 5, 6, 7, 8, 9 or 10 binding sites. In some cases, the cargo RNA (A) comprises 10 or less binding sites for complexing a modified RBP, such that m is 10, 9, 8, 7, 6, 5, 4, 3, 2 or 1. In certain cases, the cargo RNA (A) comprises 5 binding sites for complexing a modified RBP. In other cases, the cargo RNA (A) comprises 4 binding sites for complexing a modified RBP. In certain cases, the cargo RNA (A) comprises 3 binding sites for complexing a modified RBP. In some cases, the cargo RNA (A) comprises 2 binding sites for complexing a modified RBP. In other cases, the cargo RNA (A) comprises 1 binding site for complexing a modified RBP. In some embodiments of the cargo RNA (A), further comprises a binding site for a polypeptide other than the modified RBP.

[0070] In some embodiments of the modified RBPs described by (X-(L-Z)ₙ)ₘ, one or more ELPs of interest are covalently attached to X, each independently and optionally via a linking group L, such that n is 1, 2, 3, 4, 5, 6, 7, 8, 9 or 10. In some cases, 10 or fewer ELPs of interest are covalently attached to X, each independently and optionally via a linking group L, such that n is 10, 9, 8, 7, 6, 5, 4, 3, 2 or 1. In certain instances 5 ELPs of interest are covalently attached to X, each independently and optionally via a linking group L. In certain instances, 4 ELPs of interest are covalently attached to X, each independently and optionally via a linking group L. In certain instances, 3 ELPs of interest are covalently attached to X, each independently and optionally via a linking group L. In certain instances, 2 ELPs of interest are covalently attached to X, each independently and optionally via a linking group L. In certain instances, 1 ELP of interest is covalently attached to X, optionally via a linking group L. In some instances, the linking group L is a branched linker. In some instances, one or more ELPs (e.g., 1 or more, 2 or more, 3 or more, 4 or more, 5 or more, 6 or more, 7 or more, 8 or more, 9 or more, or 10 or more) of interest are covalently attached to X via one or more branched linkers.

[0071] In some embodiments, the cargo RNA (A) comprises 1-3 binding sites complexed to 1-3 modified RBPs of interest (i.e., m is 1, 2 or 3) described by (X-(L-Z)ₙ)ₘ, wherein each X is covalently attached to 1-3 ELPs of interest (i.e., n is 1, 2 or 3) optionally and independently via a linking group L.

[0072] In some cases, the one or more endosomolytic peptides is activated at low pH. The term “activated,” as used herein, in its conventional sense, refers to a peptide that has been modified (e.g. transiently or permanently) in a manner such that it is able to perform a function. For example, an activated endosomolytic peptide is able to promote endosomal escape of the modified RBP.

[0073] In some cases, the one or more endosomolytic peptides comprises an amino acid sequence selected from GLFHALLHLLHSLWHLLLHA (SEQ ID NO: 817), GLFEAIAEFIENGWEGLIEGWYGGRKKRRQRRR (SEQ ID NO: 818), GPSQPTYPGDDAPVRDLIRFYRDLRRY (SEQ ID NO: 819), WYSCNVCGKAFVLSRHLNRHLRVHRRAT (SEQ ID NO: 820) and HHEHHEHHEHHEHHEHHEHHEHHEHHE (SEQ ID NO: 821).

[0074] In some embodiments of the system, the RBP of the modified RBP is linked to the endosomolytic peptide via a cleavable linker. In certain cases, the cleavable linker is an enzyme-cleavable linker, an acid-cleavable linker, a reduction-cleavable linker or a redox-cleavable linker.

[0075] In some cases, the modified RBP comprises 1 endosomolytic peptide. In some cases, the modified RBP comprises 2 endosomolytic peptides. In other cases, the modified RBP comprises 3 endosomolytic peptides. In yet other cases, the modified RBP comprises 4 endosomolytic peptides. In some cases, the modified RBP comprises one or more endosomolytic peptides selected from any one of the amino acid sequences set forth in SEQ ID NOs: 818, 819, 820, and 821. In some cases, the one or more endosomolytic peptides comprises an amino acid sequence set forth in SEQ ID NO:818. In some cases, the one or more endosomolytic peptides comprises an amino acid sequence set forth in SEQ ID NO:819. In some cases, the one or more endosomolytic peptides comprises an amino acid sequence set forth in SEQ ID NO:820. In some cases, the one or more endosomolytic peptides comprises an amino acid sequence set forth in SEQ ID NO:21. In some cases, the one or more endosomolytic peptides comprises any one of the amino acid sequences set forth in SEQ ID NO:818-821, or a combination thereof.

[0076] In some cases, the cargo RNA comprises a binding site for a polypeptide other than the modified RBP.

[0077] In some cases, the cargo RNA is a guide RNA comprising: i) a targeting segment comprising a nucleotide sequence that hybridizes to a nucleotide sequence in a target nucleic acid; and ii) an activation segment comprising a nucleotide sequence that binds to and activates an RNA-guided effector enzyme.

[0078] In some cases, the system comprises an RNA-guided CRISRP/Cas effector polypeptide. In certain cases, the RNA-guided CRISRP/Cas effector polypeptide is a class 2 CRISPR/Cas effector polypeptide. In some cases, the class 2 CRISPR/Cas effector polypeptide is a type II CRISPR/Cas effector polypeptide. In certain cases, the class 2 CRISPR/Cas effector polypeptide is a Cas9 protein and the corresponding CRISPR/Cas guide RNA is a Cas9 guide RNA. In some cases, the class 2 CRISPR/Cas effector polypeptide is a type V or type VI CRISPR/Cas effector polypeptide. In certain cases, the class 2 CRISPR/Cas effector polypeptide is a Cpf1 protein, a C2c1 protein, a C2c3 protein, or a C2c2 protein. In some cases, the class 2 CRISPR/Cas effector polypeptide is a Cas12 enzyme (e.g., Cas12a (Cpf1), Cas12e (CasX), Cas12b1 (C2c1), Cas12c (C2c3), or Cas12d (CasY)). In other cases, the class 2 CRISPR/Cas effector polypeptide is a Cas13 enzyme (e.g., Cas13a (C2c2), Cas13d, Cas13c (C2c7), or Cas13b (C2c6)). Non-limiting examples of Cas13 enzymes can be found in Makarova et al. (CRISPR J (2018) 1(5):325-336), which is hereby incorporated by reference in its entirety. In some cases, the RNA-guided CRISRP/Cas effector polypeptide is a fusion polypeptide comprising: a) the RNA-guided CRISRP/Cas effector polypeptide; and b) a fusion partner, where the fusion partner is a base editor. In some cases, the RNA-guided CRISRP/Cas effector polypeptide is a fusion polypeptide comprising: a) the RNA-guided CRISRP/Cas effector polypeptide; and b) a fusion partner, where the fusion partner is a FokI nuclease.

[0079] In some embodiments of the system, the guide RNA comprises one or more nucleic acid modifications. In certain cases, the one or more nucleic acid modifications comprise one or more of a modified nucleobase, a modified backbone or non-natural internucleoside linkage, a modified sugar moiety, a Locked Nucleic Acid, and a Peptide Nucleic acid.

[0080] In some embodiments of the system, the RNA-guided CRISRP/Cas effector polypeptide is a fusion polypeptide comprising: i) the RNA-guided effector polypeptide; and b) a fusion partner, where the fusion partner is a targeting moiety covalently linked to the RNA-guided CRISRP/Cas effector polypeptide. In certain cases, the targeting moiety is an antibody, a ligand-binding portion of a receptor, or a ligand for a receptor.

[0081] The methods and compositions described herein can be used to deliver any RNA cargo to a cell. In some instances, the ELPs described in the present disclosure can be substituted with CPPs. For example, CPPs can be used to deliver cargo RNAs directly into the cytosol. Thus, CPPs conjugated to an RNA binding protein as described herein may be used to deliver cargo RNAs. The majority of CPPs mainly include arginine and lysine residues, making them cationic and hydrophilic. In some instances, CPPs can be amphiphilic, anionic, or hydrophobic in nature. CPPs are conventionally composed of 6-30 amino acids and, due to the short sequence length, they can be easily synthesized according to methods well known in the art. Studies have revealed that the positive charge and amphipathic nature of CPPs are the critical features for cellular internalization and allow CPPs to carry macromolecules, polypeptides, and oligonucleotides across the cell membrane. Some CPPs are derived from natural biomolecules (e.g. Tat, an HIV-1 protein), while others (e.g., polyarginine) are obtained by synthetic methods. Non-limiting examples of CPPs include HIV-1 TAT (GRKKRRQRRRPPQ; SEQ ID NO:885); Penetratin pAntp (RQIKIWFQNRRMKWKK; SEQ ID NO:886); polyarginines; HRSV (RRIPNRRPRR; SEQ ID NO:887); AIP6 (RLRWR; SEQ ID NO:888); MPG (GALFLGFLGAAGSTMGAWSQPKKKRKV; SEQ ID NO:889); Pep-1 (KETWWETWWTEWSQPKKRKV; SEQ ID NO:890); ARF(1-22) MVRRFLVTLRIRRACGPPRVRV; SEQ ID NO:891); pVEC (LLIILRRRIRKQAHAHSK; SEQ ID NO:892); Transportan (GWTLNSAGYLLGKINLKALAALAKKIL; SEQ ID NO:893); MAP17 (QLALQLALQALQAALQLA; SEQ ID NO:894); VT5 (DPKGDPKGVTVTVTVTVTGKGDPKPD; SEQ ID NO:895); Bac7 (RRIRPRPPRLPRPRPRPLPFPRPG; SEQ ID NO:896); (PPR)n ((PPR)3, (PPR)4, (PPR)5, (PPR)6); gH625 (HGLASTLTRWAHYNALIRAF; SEQ ID NO:897); and GALA (WEAALAEALAEALAEHLAEALAEALEALAA; SEQ ID NO:898). Additional examples of CPPs can be found in Singh et al. (e.g. Singh et al, Drug Deliv (2018) 25(1):2005-2015)), which is hereby incorporated by reference in its entirety.

### Modified RNA-Binding Protein

[0082] The subject modified RNA-binding protein (RBP) includes one or more endosomolytic peptides, which are covalently linked to the RBP directly or via a linker or tether. As disclosed herein, a modified RBP present in a system of the present disclosure includes an RBP that comprises a segment (e.g., a domain) that has affinity for RNA. It will be understood that the affinity for RNA need not have sequence specificity. An ELP conjugated to an RBP includes a segment, or an amino acid sequence, capable of promoting transit of co-localized macromolecular cargo from the endosome to the cytosol.

[0083] As disclosed herein, the modified RBP includes one or more ELPs covalently bound either directly or indirectly via a linker to the RBP of interest. It will be understood that conjugation of the ELP to the RBP may be achieved by any convenient methodology. The subject RBP is chosen to give this system the versatility to co-localize a precise number of ELPs to the cargo RNA complex. Through the variable number of RBP binding sites in the cargo RNA as well as the variable number of ELPs conjugated to the RBP itself, the system permits control of the number of endosomal escape-promoting polypeptides being co-localized with the cargo RNA.

### RNA-Binding Proteins

[0084] As disclosed herein, a modified RBP present in a system of the present disclosure includes an RBP that comprises a segment (e.g., a domain) that has affinity for RNA. It will be understood that the affinity for RNA need not have sequence specificity.

[0085] In some cases, the RBP present in a modified RBP of a system of the present disclosure has a length of from about 25 amino acids to about 250 amino acids; e.g., from about 25 amino acids (aa) to about 50 aa, from about 50 aa to about 75 aa, from about 75 aa to about 100 aa, from about 100 aa to about 125 aa, from about 125 aa to about 150 aa, from about 150 aa to about 175 aa, from about 175 aa to about 200 aa, from about 200 aa to about 225 aa, or from about 225 aa to about 250 aa. In some cases, the RBP present in a modified RBP of a system of the present disclosure has a length of from about 75 amino acids to about 125 amino acids. In some cases, the RBP present in a modified RBP of a system of the present disclosure has a length of from about 100 amino acids to about 150 amino acids. In some cases, the RBP present in a modified RBP of a system of the present disclosure has a length of from about 95 amino acids to about 105 amino acids. In certain cases, the RBP has a length of about 100 amino acids. In some cases, the RBP has a length of 98 amino acids, 99 amino acids, 100 amino acids, 101 amino acids, or 102 amino acids.

[0086] In some cases, the RBP comprises an amino acid sequence having at least 85%, at least 90%, at least 95%, at least 98%, at least 99%, or 100%, amino acid sequence identity to the amino acid sequence of an RBP selected from an MS2 coat polypeptide (see e.g., Golmohammade et al. J Mol Biol (1993) 234(3):620-639), a U1A snRNP polypeptide (e.g. UniProtKB/Swiss-Prot: P09012.3), a U2B polypeptide (e.g. NCBI Ref Seq NP_003083.1), a PP7 viral coat polypeptide (see e.g., Dhaese et al, Biochem Biophys Res Commun (1980) 94(4): 1394-1400), a poly(A)-binding protein (PABP) (see e.g., Eliseeva et al, Biochemistry (Moscow) 78(13):1377-1391), a stem-loop binding polypeptide, a boxB polypeptide (see e.g., Das Annu Rev Biochem (1993) 62:893-930), a Csy4 polypeptide (see e.g., Haurwitz et al. Science (2010) 329:1355-1358), a HuA polypeptide, a HuB polypeptide, a HuC polypeptide, a HuD polypeptide (see e.g., Hinman and Lou, Cell Mol Life Sci (208) 65(20):3168-81), an hnRNP polypeptide (see e.g. Geuens et al, Hum Genet (2016) 135(8):851-67), a CArG polypeptide (see e.g., Penalver-Mellado et al. Mol Microbiol 61:910-926), a NusA polypeptide (see e.g., Mooney et al, Mol Cell (2009) 33:97-108), a KH-type polypeptide (e.g., a Nova-2 KH3 polypeptide, see e.g., Siomi et al, Nucleic Acids Res (1993) 21:1193-1198)), or an eIF4A polypeptide (see e.g., NM_001204510.2, UniProtKB/Swiss-Prot P60842), which are hereby incorporated by reference in their entirety. Particular examples of RBPs for use in the present system include but are not limited to, the N-terminal domain of human U1A, an MS2 protein, and a PP7 viral coat protein, including variants or derivatives thereof.

[0087] In some cases, the RNA binding protein is selected from the RNA Recognition Motif (RRM) family of cellular proteins involved in pre-messenger RNA processing. One example of such a protein is the U1A snRNP protein. More than 200 members of the RRM superfamily have been reported, the majority of which are ubiquitously expressed and conserved in phylogeny (Query et al, Cell (1989) 57: 89-101; Kenan et al, Trends Biochem. Sci. (1991) 16: 214-220). Most are known to have binding specificity for polyadenylate mRNA or small nuclear ribonucleic acids (e.g. U1, U2, etc.) transfer RNAs, 5S or 7S RNAs. They include but are not limited to hnRNP proteins (A, B, C, D, E, F, G, H, I, K, L), RRM proteins CArG, DT-7, PTB, K1, K2, K3, HuD, HUC, rbp9, elF4B, sxl, tra-2, AUBF, AUF, 32KD protein, ASF/SF2, U2AF, SC35, and other hnRNP proteins.

[0088] In some cases, the RBP is a UA1 polypeptide comprising amino acid sequence having at least 85%, at least 90%, at least 95%, at least 98%, at least 99%, or 100%, amino acid sequence identity to one of the amino acid sequences depicted in FIG. 1. The UA1 polypeptide can be modified to include 1, 2, 3, 4, 5, or more than 5, cysteine residues.

[0089] In certain cases, the RBP includes an underlying sequence (e.g., a consensus sequence of fixed amino acid residues) having 60% or more amino acid sequence identity, such as 70% or more, 80% or more, 85% or more, 90% or more, 95% or more or 98% or more amino acid sequence identity to the corresponding amino acid sequence of the native parent protein sequence. A subject RBP sequence may include 1 or more, such as 2 or more, 3 or more, 4 or more, 5 or more, 10 or more, 15 or more, or even 20 or more additional amino acids compared to a native parent protein sequence, e.g., in the form on a N-terminal or C-terminal extension sequence or in the form of an insertion mutation. In some cases, 30 or less additional amino acids, such as 1-20 residues, 2-10 residues, or even 2-5 additional peptidic residues are included in the parent RBP native parent protein sequence. Alternatively, a subject RBP sequence may include fewer amino acids compared to a native parent protein sequence motif, such as 1, 2, 3, 4, 5, 6, 7, 8, 9 or 10, or even fewer residues, e.g., by having deletions at the N-terminus and/or C-terminus, truncations, or modifications at locations in the sequence that do not adversely affect the structural motif.

[0090] The RBP may include mutations at various positions of the native parent protein sequence, e.g., variant amino acids at certain positions within the protein scaffold. When a RBP arises from amino acid mutations at various positions within the native parent protein sequence, the amino acids at those positions are referred to as “variant amino acids.” The underlying parent sequence includes those residues that are “fixed amino acids” (e.g., non-variant amino acids). Such variant amino acids may confer on the resulting RBPs different functions, such as specific binding to a target endosomolytic peptide, or increased stability relative to the parent protein sequence.

[0091] Any convenient locations of the RBP native parent protein sequence of interest may be selected for any convenient number of mutations (e.g., 1, 2, 3, 4, 5 or more mutations). In some cases, five or more mutations may be introduced at any convenient five or more variant amino acid locations of the parent protein. In other cases, five or less mutations may be introduced at any convenient five or less variant amino acid locations of the parent protein.

[0092] In some instances, the RBP native parent protein sequence includes five or more mutations, such as 6 or more, 7 or more, 8 or more, 9 or more, 10 or more, 11 or more, 12 or more, 13 or more, 14 or more, 15 or more, 16 or more mutations, e.g., at any convenient position in the parent RBP sequence. In some instances, the RBP native parent protein sequence includes five or less mutations, such as 4 or less, 3 or less, 2 or less, 1 or no mutations, e.g., at any convenient position in the parent RBP sequence.

[0093] The subject RBP may be any of any convenient length. In some cases, the subject RBP includes an amino acid sequence of between 45 and 200 residues, such as between, 45 and 180 residues, 45 and 160 residues, 45 and 140 residues, 45 and 120 residues, 45 and 100 residues, 45 and 80 residues, 45 and 60 residues, 60 and 200 residues, 60 and 180 residues, 60 and 160 residues, 60 and 140 residues, 60 and 120 residues, 60 and 100 residues, 60 and 80 residues, 80 and 200 residues, 80 and 180 residues, 80 and 160 residues, 80 and 140 residues, 80 and 120 residues, 80 and 110 residues, 80 and 100 residues, 90 and 200 residues, 90 and 150 residues, 90 and 110 residues. In some cases, the subject RBP includes an amino acid sequence of about 100 residues. It is understood that the number of residues comprised in each RBP may vary according to the underlying scaffold, extension sequences, mutations included, etc.

[0094] In one instance, the RNA binding protein (RBP) is the N-terminal domain of a human U1A protein, also referred to herein as “U1A”. The U1A construct comprises a sequence as follows:

(SEQ ID NO: 822)
MAVPETRPNHTIYINNLNEKIKKDELKKSLYAIFSQFGQILDILVSRSLK
MRGQAFVIFKEVSSATNALRSMQGFPFYDKPMRIQYAKTDSDIIAKMK

[0095] The RNA binding protein (RBP) may comprise a U1A protein as shown above (SEQ ID NO: 822) including mutations at various positions of the parent sequence, e.g., variant amino acids at certain positions within the U1A protein.

[0096] It will be understood that the RBP may comprise a U1A protein as shown above (SEQ ID NO: 822) or a fragment or modified sequence thereof, e.g., having 1 or more C or N terminal deletions or truncations, e.g. by 1-5 amino acid residues.

[0097] In one example, the modified RBP comprises a U1A protein of SEQ ID NO: 822 comprising 2 or more mutations, such as 3 or more, 4 or more, 5 or more, or even more. In some cases, the RBP comprises a modified U1A protein of SEQ ID NO: 822 comprising 5 or less mutations, such as 4 or less, 3 or less, 2 or less, 1 or no mutations. Any convenient locations of the RBP protein of interest may be selected for any convenient number of mutations (e.g., 1, 2, 3, 4, 5 or more mutations). In some cases, one or more mutation is a conservative amino acid substitution (e.g., as described herein).

[0098] In some embodiments of the U1A protein, the Y31 residue is substituted with a H residue (Y31H). In some embodiments of the U1A protein, the Q36 residue is substituted with an R residue (Q36R).

[0099] In some embodiments of the U1A protein, at least one S residue is substituted with a C residue. In some cases, two S residues are substituted with C residues. In other cases, three S residues are substituted with C residues. In some cases, S71 is substituted with a C residue (S71C). In some cases, S35 is substituted with a C residue (S35C). In some cases, S63 is substituted with a C residue (S63C). In certain cases, S35 and S71 are substituted with C residues (S35C and S71C). In some cases, S63 and S35 are substituted with C residues (S63C and S35C). In some cases, S63 and S71 are substituted with C residues (S63C and S71C). In some cases, S35, S63 and S71 are mutated to C residues (S35C, S63C and S71C). In some cases, the sites substituted with a C residue are on the opposite face of the U1A protein from the RNA-binding site.

[0100] In some embodiments of the modified U1A protein (e.g. a U1A protein that has been modified with a mutation and/or substitution as described herein), the Y, Q and S residues are substituted. In some cases, the Y31 residue is substituted with an H residue (Y31H), the Q36 residue is substituted with an R residue (Q36R). In some cases, one or more of amino acid positions 35, 63 and 71 are modified with one or more residue substitutions. In some cases, the modified U1A protein comprises Y31H, S35C and Q36R substitutions. In some cases, the modified U1A protein comprises Y31H, S35C, Q36R and S63C substitutions. In some cases, the modified U1A protein comprises Y31H, S35C, Q36R and S71C substitutions. In some cases, the modified U1A protein comprises Y31H, S35C, Q36R, S63C and S71C substitutions.

[0101] In some cases, the RBP is a U1A protein including three or more mutations located at three or more positions, e.g., as depicted in any of SEQ ID NOs: 823-825 (mutations underlined, see also FIG. 1):

(SEQ ID NO: 823)
MAVPETRPNHTIYINNLNEKIKKDELKKSLHAIFSRFGQILDILVSRSLK
MRGQAFVIFKEVSSATNALRCMQGFPFYDKPMRIQYAKTDSDIIAKMK
(SEQ ID NO: 824)
MAVPETRPNHTIYINNLNEKIKKDELKKSLHAIFCRFGQILDILVSRSLK
MRGQAFVIFKEVSSATNALRCMQGFPFYDKPMRIQYAKTDSDIIAKMK
(SEQ ID NO: 825)
MAVPETRPNHTIYINNLNEKIKKDELKKSLHAIFCRFGQILDILVSRSLK
MRGQAFVIFKEVCSATNALRCMQGFPFYDKPMRIQYAKTDSDIIAKMK

[0102] In some cases, the RBP is an MS2 coat protein. In some cases, an MS2 coat protein comprises an amino acid sequence having at least 85%, at least 90%, at least 95%, at least 98%, at least 99%, or 100%, amino acid sequence identity to the following MS2 coat protein amino acid sequence:

(SEQ ID NO: 849)
MASNFTQFVL VDNGGTGDVT VAPSNFANGV AEWISSNSRS
QAYKVTCSVR QSSAQNRKYT IKVEVPKVAT QTVGGVELPV
AAWRSYLNME LTIPIFATNS DCELIVKAMQ GLLKDGNPIP
SAIAANSGIY.

[0103] In one example, the modified RBP comprises a MS2 coat protein comprising 1 or more mutations (e g amino acid substitutions), such as 2 or more, 3 or more, 4 or more, 5 or more, or even more. Any convenient locations of the MS2 scaffolds of interest may be selected for any convenient number of mutations (e.g., 1, 2, 3, 4, 5 or more mutations). In some cases, amino acid residues in particular locations in the wildtype sequence of MS2 are substituted with cysteines, histidines and/or arginines.

[0104] In some cases, the RBP is a PP7 coat protein. In some cases, a PP7 coat protein comprises an amino acid sequence having at least 85%, at least 90%, at least 95%, at least 98%, at least 99%, or 100%, amino acid sequence identity to the following PP7 coat protein amino acid sequence:

(SEQ ID NO: 850)
SKTIVLSVGE ATRTLTEIQS TADRQIFEEK VGPLVGRLRL
TASLRQNGAK TAYRVNLKLD QADVVDCSTS VCGELPKVRY
TQVWSHDVTI VANSTEASRK SLYDLTKSLV VQATSEDLVV
NLVPLGR.

[0105] In one example, the modified RBP comprises a PP7 protein sequence motif comprising 2 or more mutations (e.g., amino acid substitutions), such as 3 or more, 4 or more, 5 or more, or even more. Any convenient locations of the PP7 scaffolds of interest may be selected for any convenient number of mutations (e.g., 1, 2, 3, 4, 5 or more mutations). In some embodiments, amino acids residues in particular locations in the wildtype sequence of PP7 are substituted with cysteines, histidines and/or arginines.

[0106] It will be understood that any of RBPs disclosed herein (e.g., a U1A protein, an MS2 protein, a PP7 protein, etc.) may include additional mutations, fragments and other modified variations thereof. A mutation in a parent sequence or fragment thereof may include a deletion, insertion, or substitution of an amino acid residue at any convenient position to produce a sequence that is distinct from the parent sequence or fragment, yet still retains affinity for RNA. In certain cases, the amino acid substitution is a conservative amino acid substitution (e.g., as described herein). In certain cases, a RBP is modified at the C and/or N terminus with a certain number of C or N terminal deletions, truncations or additional amino acid residues, e.g., such as the addition or deletion of 1 to 5 amino acid residues.

[0107] In some cases, the RBPs disclosed herein include a chemoselective functional group or a compatible functional group that is capable of conjugating to a chemoselective group or a compatible functional group or a of an ELP. In certain cases, the chemoselective or compatible functional groups for inclusion in the subject RBPs, include, but are not limited to: an azido group, an alkynyl group, a phosphine group, a cysteine residue, a C-terminal thioester, aryl azides, maleimides, carbodiimides, N-hydroxysuccinimide (NHS)-esters, hydrazides, PFP-esters, hydroxymethyl phosphines, psoralens, imidoesters, pyridyl disulfides, isocyanates, aminooxy-, aldehyde, keto, chloroacetyl, bromoacetyl, and vinyl sulfones. In certain cases, the RBP comprises a defined number of cysteine residues (which may be introduced via site mutagenesis), of which one can chemically conjugate a defined number of ELPs. It will be understood that the cysteine residues or other group compatible for conjugation with an ELP may be at any convenient location within the RBP, e.g., on a sidechain of a residue, at the C-terminus or at the N-terminus. In certain cases, the cysteine residues or other group compatible for conjugation with an ELP is on the opposite face of the RBP from the RNA-binding site.

[0108] In some cases, a modified RBP comprises an ELP at the N-terminus of an RBP. In some cases, a modified RBP comprises an ELP at the C-terminus of an RBP. In some cases, a modified RBP comprises an ELP at the N-terminus of an RBP and at the C-terminus of an RBP. In some cases, a modified RBP comprises a single ELP at the N-terminus of an RBP. In some cases, a modified RBP comprises a single ELP at the C-terminus of an RBP. In some cases, a modified RBP comprises, in order from N-terminus to C-terminus: i) an ELP; and ii) an RBP. In some cases, a modified RBP comprises, in order from N-terminus to C-terminus: i) an ELP; ii) a linker peptide of from 1 to 10 amino acids in length; and iii) an RBP. In some cases, a modified RBP comprises, in order from N-terminus to C-terminus: i) an RBP; and ii) an ELP. In some cases, a modified RBP comprises, in order from N-terminus to C-terminus: i) an RBP; ii) a linker peptide of from 1 to 10 amino acids in length; and iii) an ELP.

[0109] In some cases, a modified RBP comprises one or more ELP(s) at the N-terminus of an RBP and one or more ELP(s) covalently linked at internal location(s) within the RBP protein sequence. In some cases, a modified RBP comprises one or more ELP(s) at the C-terminus of the RBP and one or more ELP(s) covalently linked at internal location(s) within the RBP protein sequence. In some cases, a modified RBP comprises, in order from N-terminus to C-terminus: i) an ELP; and ii) an RBP comprising an ELP linked at an internal location within the RBP. In some cases, a modified RBP comprises, in order from N-terminus to C-terminus: i) an ELP; ii) a linker peptide of from 1 to 10 amino acids in length; and iii) an RBP comprising a linker peptide of from 1 to 10 amino acids in length covalently linked to an ELP. In some cases, a modified RBP comprises, in order from N-terminus to C-terminus: i) an RBP comprising one or more ELPs covalently linked at internal location(s) within the RBP sequence; and ii) an ELP. In some cases, a modified RBP comprises, in order from N-terminus to C-terminus: i) an RBP comprising a linker peptide of from 1-10 amino acids in length covalently linked to an ELP and ii) an ELP. In any of the above embodiments comprising a U1A protein, the internal location for the attachment of the one or more ELP(s) may be chosen from positions 31, 35, 36, 63 and/or 71. In some cases, the RBP comprises additional modifications to add functionality and/or assist in protein purification. In some cases, the RBP comprises one or more nuclear localization sequences (NLS) to facilitate transport of the RBP into the nucleus. The RBP may comprise 1, 2, 3, 4, 5, 6, 7, 8, 9, 10 or more NLSs. In some cases, the RBP comprises about or more than about 1, 2, 3, 4, 5, 6, 7, 8, 9, 10, or more NLSs at or near the amino-terminus, about or more than about 1, 2, 3, 4, 5, 6, 7, 8, 9, 10, or more NLSs at or near the carboxyl-terminus, or a combination of these (e.g. one or more NLS at the amino-terminus and one or more NLS at the carboxyl terminus). Non-limiting examples of NLS sequences include the monopartite SV40 large T antigen NLS (PKKKRRV; SEQ ID NO:899) and the bipartite NLS from nucleoplasmin (KRPAATKKAGQAKKKK; SEQ ID NO:900). See e.g. (Lange et al, J Biol Chem (2007) 282(8):5101-5105), which is hereby incorporated by reference in its entirety. Other examples include the NLS from c-Myc (PAAKRVKLD (SEQ ID NO:901); or RQRRNELKRSP (SEQ ID NO:902)), EGL-13 (MSRRRKANPTKLSENAKKLAKEVEN; SEQ ID NO:903), and TUS protein (KLKIKRPVK; SEQ ID NO:904); the nRNPA1 M9 NLS (NQSSNFGPMKGGNFGGRSSGPYGGGGQYFAKPRNQGGY; SEQ ID NO:905); the IBB domain from importin-alpha (RMRIZFKNKGKDTAELRRRRVEVSVELRKAKKDFQILKRRNV; SEQ ID NO:906); the NLS sequences from the myoma T protein (VSRKRPRP (SEQ ID NO:907); and PPKKARED (SEQ ID NO:908)); the p53 protein sequence POPKKKPL (SEQ ID NO:916); the sequence SALIKKKKKMAP (SEQ ID NO:909) of mouse c-abl IV; the sequences DRLRR (SEQ ID No:910) and PKQKKRK (SEQ ID NO:911) of the influenza virus NS1); the sequence RKLKKKIKKL (SEQ ID NO:912) of the Hepatitis virus delta antigen; the sequence REKKKFLKRR (SEQ ID NO:913) of the mouse Mxl protein; the sequence KRKGDEVDGVDEVAKKKSKK (SEQ ID NO:914) of the human poly(ADP-ribose) polymerase; and the sequence RKCLQAGMNLEARKTKK (SEQ ID NO:915) of the steroid hormone receptors (human) glucocorticoid. See e.g. Ray et al., Bioconjug Chem (2015) 26 (6):1004-7, which is hereby incorporated by reference in its entirety. In some cases, the RBP comprises a peptide tag to assist in purification and modification of the protein. In some cases, the RBP comprises a HIS tag (e.g. a 6×His-tag, see Hochuli et al., Bio/Technology (1988) 6(11):1321-5), which is hereby incorporated by reference in its entirety. Other examples of peptide tags to assist purification include glutathione S-transferase followed by a protease cleavage site (e.g. GST fusion); maltose binding protein fusions (MBP fusion); calmodulin binding peptide (CBP fusion); intein-chitin binding domain (intein-CBD); streptavidin/biotin based tags; FLAG tags; reporter tags such as ®-galactosidase, alkaline phosphatase, and the like; small ubiquitin like modifier fusions, and PDZ domain-based tags. Non-limiting examples of peptide tags can be found in Kimple et al. (Curr Protoc Protein Sci (2013) 73, unit 9-9), which is hereby incorporated by reference in its entirety.

### Endosomolytic Peptides

[0110] As disclosed herein the ELPs include amino acid sequences capable of promoting transit of co-localized macromolecular cargo (e.g., a modified RBP complexed with a modified cargo RNA, as described herein) from the endosome (or other cellular compartment, e.g., a membrane-bound cellular compartment) to the cytosol. Any convenient ELP capable of promoting transit of co-localized macromolecular cargo from the endosome to the cytosol can be used in the present systems.

[0111] The subject ELPs promote endosomal escape following endocytosis and as such are capable of preventing the macromolecular cargo from being trafficked to the lysosome for rapid degradation. In some cases, the ELP is a cell penetrating peptide. In other cases, the ELP is not a cell penetrating peptide.

[0112] In some cases, the subject ELP is polyanionic, peptidomimetic or a peptide having a neutral or near-neutral charge at physiological pH, which shows pH-dependent membrane lytic activity and leads to endosome lysis or leakage. In certain cases, the endosomolytic peptide assumes its active conformation at endosomal pH. The “active” conformation is that conformation in which the endosomolytic component promotes lysis of the endosome and/or transport of the cargo RNA of the invention, or its components, from the endosome to the cytoplasm of the cell. See, e.g., Martin M. E. et al. Peptide-guided gene delivery, the AAPS Journal, 2007, 9(1), article 3. The term “activation”, as used herein when referring to an ELP, refers to protonation of the ELP molecule such that it is able to promote endosome lysis. For example, protonation will occur to an increasing percent as the local pH decreases such that endosomal lysis can occur at more neutral pHs and increase in efficiency as the pH decreases.

[0113] In some cases, the subject ELP has a length of from about 5 amino acids to about 60 amino acids, such as 5 to 10, 10 to 20, 20 to 30, 30 to 40, 40 to 50 or 50 to 60 amino acids. In some case, the subject ELP has a length of less than 60 amino acids, such as 50 or less, 40 or less, 35 or less, 30 or less, 25 or less, 20 or less, 15 or less, 10 or less. In certain cases, the ELP is from 20 to 30 amino acids, such as 20, 21, 22, 23, 24, 25, 26, 27, 28, 29 or 30 amino acids. In certain cases, the ELP has a length of from about 20 to 35 amino acids, such as 20, 21, 22, 23, 24, 25, 26, 27, 28, 29, 30, 31, 32, 33, 34, 35 amino acids. In some cases, the ELP has a length of about 20 amino acid residues. In other cases, the ELP has a length of 27 amino acid residues. In other cases, the ELP has a length of 28 amino acid residues. In some other cases, the ELP has a length of 33 amino acid residues.

[0114] In some cases, the ELPs are rich in histidine residues. In some cases, the ELP comprises from 20% to 70% histidine residues, such as 25% to 70%, 30% to 70%, 35% to 70%, 40% to 70%, 45% to 70%, 50% to 70%, 55% to 70%, 60% to 70% or 65 to 70% histidine residues. In other cases, the ELP comprises from 20% to 30%, 20% to 35%, 20% to 35%, 20% to 40%, 20% to 45%, 20% to 50%, 20% to 55%, 20% to 60% or 20% to 65%. In some cases, the ELP comprises 20% or more histidine residues, such as 25% or more, 30% or more, 40% or more, 45% or more, 55% or more, 60% or more, or 65% or more, or even more. In certain cases, the ELP comprises less than 70% histidine residues, such as 65% or less, 50% or less, 40% or less, 30% or less, or even less. In some cases, the ELP comprises 25% to 30% histidine residues. In some cases, the ELP comprises 60% to 70% histidine residues.

[0115] In some cases, the ELP comprises a histidine-rich peptide selected from, but not limited to, GLFHALLHLLHSLWHLLLHA (SEQ ID NO: 817), CHK₆HC (SEQ ID NO:826); H₅WYG (SEQ ID NO: 827), GLFHAIAHFIHGGWHGLIHGWYG (SEQ ID NO:828), (H2E)9: HHEHHEHHEHHEHHEHHEHHEHHEHHE (SEQ ID NO: 821); and variants, analogues or derivatives thereof.

[0116] In some cases, the ELP comprises a synthetic peptide. In some cases, the ELP comprises ppTG21: GLFHALLHLLHSLWHLLLHA (SEQ ID NO: 817), having the structure:

[chemical structure]

[0117] wherein the hydrogen atoms are omitted from the peptide structure for clarity of view. See Rittner, Karola, et al., New Basic Membrane-Destabilizing Peptides for Plasmid-Based Gene Delivery in Vitro and in Vivo, MOLECULAR THERAPY 5(2) 104-114 (2002).

[0118] In some cases, the ELP comprises 55% or less cationic amino acid residues, such as 50% or less, 45% or less, 40% or less, 30% or less, or even less. In other cases, the ELP comprises from 20% to 55% cationic residues, such as 20% to 25%, 20% to 30%, 20% to 35%, 20% to 40%, 20% to 45%, 20% to 50% cationic residues. In some cases, the ELP comprises 20% to 25% cationic residues. In some cases, the ELP comprises 30% to 40% cationic residues. In some cases, the ELP comprises 45% to 55% cationic residues.

[0119] In some cases, the ELP is a poly(histidine) peptide. For example, in some cases, the ELP is (His)ₙ where n is an integer from 1 to 10, e.g., where n is 1, 2, 3, 4, 5, 6, 7, 8, 9, or 10.

[0120] In some cases, the ELP comprises only leucine and histidine residues. For example, in some cases, the ELP comprises the amino acid sequence

(SEQ ID NO: 851)
LHHLLHHLLHHLHHLLHHLHHLLHHL.

[0121] In some cases, the ELP comprises E5-TAT (see e.g., Lee et al, Biochemistry (2010) 49(36):7854-7866): GLFEAIAEFIENGWEGLIEGWYGGRKKRRQ RRR (SEQ ID NO: 818), a variant, analog or derivative thereof.

[0122] In some cases, the ELP comprises Miniature Protein 5.3 (see e.g., Appelbaum, et al, Chem Biol (2012) 19(7):819-830): GPSQPTYPGDDAPVRDLIRFYRDLRRY (SEQ ID NO: 819), a variant, analog, or derivative thereof.

[0123] In some cases, the ELP comprises ZF5.3 (see Appelbaum, ibid): WYSCNVCGKAFVLSRHLNRHLRVHRRAT (SEQ ID NO: 820), a variant, analog or derivative thereof.

[0124] In some cases, the ELP suitable for use herein comprises a plurality of proton acceptor sites having pKa values between physiological and lysosomal pH. In some cases, the ELP suitable for use herein comprises a plurality of proton acceptor sites having pKa values within the range of 4 to 7. In some cases, the ELP may be modified with groups selected from imidazole-containing compounds, e.g., peptides comprising one or more histidine, histamine, vinylimidazole, or combinations thereof.

[0125] In some cases, the ELP comprises a scrambled peptide of any of the subject ELPs (e.g., as described herein), wherein a “scrambled peptide” will be understood as a random permutation of the original peptide sequence.

[0126] It will be understood that any of ELPs disclosed herein may include additional mutations, fragments and other modified variations thereof. A mutation in a parent sequence or fragment thereof may include a deletion, insertion, or substitution of an amino acid residue at any convenient position to produce a sequence that is distinct from the parent sequence or fragment, yet still retains its ability to promote endosomal escape following endocytosis. In some cases, an amino acid substitution is a conservative amino acid substitution (e.g., as described herein). In certain cases, a ELP is modified at the C and/or N terminal with a certain number of C or N terminal deletions, truncations or additional amino acid residues, e.g., such as the addition or deletion of 1 to 5 amino acid residues.

[0127] In some cases, the ELPs disclosed herein comprise a chemoselective reactive functional group that is capable of conjugating to a compatible functional group of an RBP. In certain cases, the chemoselective reactive functional groups for inclusion in the subject peptidic compounds, include, but are not limited to: an azido group, an alkynyl group, a phosphine group, a cysteine residue, a C-terminal thioester, aryl azides, maleimides, carbodiimides, N-hydroxysuccinimide (NHS)-esters, hydrazides, PFP-esters, hydroxymethyl phosphines, psoralens, imidoesters, pyridyl disulfides, isocyanates, aminooxy-, aldehyde, keto, chloroacetyl, bromoacetyl, and vinyl sulfones. In some cases, the chemoselective reactive functional group is a cysteine residue. In certain cases, the chemoselective reactive functional group is a cysteine residue which has been further modified with a functional group capable of facilitating a disulfide exchange reaction e.g. a pyridyl disulfide group.

[0128] In some cases, the ELP is a synthetically modified ppTG21 peptide bearing a pyridyl disulfide leaving group to facilitate conjugation, e.g., as described by the sequence GLFHALLHLLHSLWHLLLHA (C) [pyridyl disulfide] (SEQ ID NO: 817), wherein the ppTG21 peptide includes a C-terminal cysteine residue (C) to facilitate thiol-based conjugation to a cysteine-bearing U1A RBP.

### Fusion Polypeptides

[0129] As noted above, any of the ELPs described herein can be conjugated to RBP of interest by any convenient conjugation chemistry, to generate a modified RBP. Alternatively, a modified RBP can be a fusion polypeptide.

[0130] In some cases, a modified RBP is a fusion polypeptide comprising an ELP at the N-terminus of an RBP. In some cases, a modified RBP is a fusion polypeptide comprising an ELP at the C-terminus of an RBP. In some cases, a modified RBP is a fusion polypeptide comprising an ELP at the N-terminus of an RBP and at the C-terminus of an RBP. In some cases, a modified RBP is a fusion polypeptide comprising an ELP located at an internal location of an RBP. In some cases, a modified RBP is a fusion polypeptide comprising an ELP at the N-terminus, the C-terminus, and/or an ELP located at an internal location of an RBP. In some cases, a modified RBP is a fusion polypeptide comprising a single ELP at the N-terminus of an RBP. In some cases, a modified RBP is a fusion polypeptide comprising a single ELP at the C-terminus of an RBP. In some cases, a modified RBP is a fusion polypeptide comprising, in order from N-terminus to C-terminus: i) an ELP; and ii) an RBP. In some cases, a modified RBP is a fusion polypeptide comprising, in order from N-terminus to C-terminus: i) an ELP; ii) a linker peptide of from 1 to 10 amino acids in length; and iii) an RBP. In some cases, a modified RBP is a fusion polypeptide comprising, in order from N-terminus to C-terminus: i) an RBP; and ii) an ELP. In some cases, a modified RBP is a fusion polypeptide comprising, in order from N-terminus to C-terminus: i) an RBP; ii) a linker peptide of from 1 to 10 amino acids in length; and iii) an ELP.

### Conjugation

[0131] Any of the ELPs described herein can be conjugated to an RNA-binding protein (RBP) of interest by any convenient conjugation chemistry. In one example, the ELP includes a chemoselective functional group that is capable of conjugating to a compatible functional group in an RBP of interest, or vice versa. In certain cases, the RBP of interest can include a precise number of compatible functional groups, so as to conjugate a precise number of ELPs to obtain a modified ELP of interest. In certain cases, the RBP includes 1 or more compatible functional groups, such as 2, 3, 4, 5, 6, 7, 8, 9 or 10. In some cases, the RBP includes 10 or fewer compatible functional groups, such as 9, 8, 7, 6, 5, 4, 3, 2, 1. In certain cases, the RBP of interest includes 3 compatible functional groups. In some cases, the RBP of interest includes 2 compatible functional groups. In other cases, the RBP of interest includes 1 compatible functional group. It will be understood that an RBP of interest may include, or be modified to include, any convenient number of compatible functional groups for conjugation to a subject ELP.

[0132] In some cases, the modified RBP is described by the formula:

X-(L-Z)n

wherein, X is a RBP (e.g. as described herein), L is an optional linking group, Z is an ELP of interest and n is an integer from 1 to 10. Z, or L if present, is attached to X at any convenient location (e.g., via a sidechain of a residue, the N-terminus or the C-terminus).

[0133] In some cases, the ELP peptide (Z) includes a chemoselective group, e.g. at its N-terminus or its C-terminus. In some instances, the chemoselective group is covalently attached via the alpha-amino group of the N-terminal residue, or is covalently attached to the alpha-carboxyl acid group of the C-terminal residue. In other instances, the chemoselective group is attached to the ELP via a sidechain group of a residue. In certain cases, the chemoselective group is a cysteine residue. In certain cases, the cysteine residue has been modified with a functional group capable of facilitating a disulfide exchange reaction with a cysteine residue in the RBP of interest e.g., modified to include a pyridyl disulfide group.

[0134] In some cases, the RBP (X) includes 1 to 10 compatible functional groups for ELP attachment, such as 1, 2, 3, 4, 5, 6, 7, 8, 9 or 10 compatible groups. In some cases, the RBP (X) includes 1 to 5 compatible functional groups for ELP attachment, such as 1, 2, 3, 4 or 5 compatible groups. In some cases, the RBP includes 1 compatible functional group. In some cases, the RBP includes 2 compatible functional groups. In some cases, the RBP includes 3 compatible functional groups. In some cases, the RBP includes 4 compatible functional groups. In some cases, the RBP includes 5 compatible functional groups. In some cases, all compatible functional groups are on a sidechain of a residue. In some cases, at least one compatible functional group is at the C-terminus of the protein. In some cases, at least one compatible functional group is at the N-terminus of the protein. In certain cases, a compatible functional group on the RBP, includes, but is not limited to: an azido group, an alkynyl group, a phosphine group, a cysteine residue, a C-terminal thioester, aryl azides, maleimides, carbodiimides, N-hydroxysuccinimide (NHS)-esters, hydrazides, PFP-esters, hydroxymethyl phosphines, psoralens, imidoesters, pyridyl disulfides, isocyanates, aminooxy-, aldehyde, keto, chloroacetyl, bromoacetyl, and vinyl sulfones.

[0135] In certain cases, the compatible functional group on the RBP is a cysteine residue. In certain cases, the RBP comprises one or more cysteine residues as the compatible functional group. Generally speaking, a single RBP may contain a precise number of cysteine residues (which may be introduced via site mutagenesis), of which one can chemically conjugate a precise number of ELPs. In one example, the ELPs contain cysteine residues modified with a pyridyl disulfide group to facilitate disulfide exchange reaction with the compatible cysteine residues of the RBPs.

[0136] It will be understood that conjugation of the ELPs to an RBP of interest can be readily achieved by a wide variety of commercially reactive compounds cross-linkers or via novel cross-linkers containing commonly used reactive groups such as, modified cysteine residues for disulfide exchange, N-hydroxysuccinimide (NHS)-esters/sulfonyl chlorides/isothiocyanates, maleimides/bromoacetimides and “click chemistry” involving a terminal alkyne or activated alkyne analogue (e.g. cyclooctyne) and an azide or a nitrone.

[0137] The term “click chemistry” is used to describe any facile reaction that occurs in high yields, under mild conditions, and in the presence of diverse functional groups, but it is most commonly used to refer to a [3+2] azide-alkyne cycloaddition reaction (see e.g., Musumeci et al, Curr Med Chem (2015) 22(17):2022-50). Such reactions are generally catalyzed by CuI, but may also be copper free (e.g., with a strained alkyne, such as a cyclooctyne), and proceed in the presence of functional groups typically encountered in biological molecules. In some cases, an unnatural sidechain or terminal group may be introduced into the RBP, wherein the sidechain or terminal group is modified to comprise an alkyne or azide. Accordingly, the ELP of interest may be modified to include a compatible alkyne or azide to facilitate the click reaction.

[0138] In some cases, one or more linkers are present between the RBP and one or more of the ELPs. In some cases, the linker is between the ELP and a chemoselective group capable of conjugating to an RBP of interest. In some cases, the linker is between the RBP and a compatible functional group capable of conjugating an ELP of interest. The linker may be present at any convenient location that facilitates conjugation between the RBP and ELP of interest. The linker may be cleavable or non-cleavable.

### Cleavable Linkers

[0139] In some cases, the RBP of the modified RBP is linked to the ELP via a cleavable linker. In some cases, the linker is cleavable under intracellular conditions, such that the cleavage of the linker releases the ELP from the modified RBP in the intracellular environment. In some cases, the linker is cleavable by a cleaving agent that is present in the intracellular environment (e.g. within a lysosome or endosome or caveolus). One example of a cleavable linker is an enzymatically cleaved linker i.e., a peptidyl linker that is cleaved by an intracellular peptidase or protease enzyme, including but not limited to, a lysosomal or endosomal protease. In some cases, the peptidyl linker is at least two amino acids long or at least three amino acids long. Enzymatic cleaving agents include cathepsins B and D and plasmin, all of which are known to hydrolyze dipeptide drug derivatives resulting in the release of active drug inside the target cells (see Dubowchik, Gene M. et al., Cathepsin B-Labile Dipeptide Linkers for Lysosomal Release of Doxorubicin, Bioconjugate Chem. 2002, 13, 855-869). Such linkers include peptides and dipeptides including those described in the above publications which are incorporated herein by reference in their entireties for all purposes.

[0140] Peptide-based cleavable linking groups are peptide bonds formed between amino acids to yield oligopeptides (e.g., dipeptides, tripeptides etc.) and polypeptides. A peptide bond is a special type of amide bond formed between amino acids to yield peptides and proteins. The peptide-based cleavage group is generally limited to the peptide bond (i.e., the amide bond) formed between amino acids yielding peptides and proteins and does not include the entire amide functional group. Peptide-based cleavable linking groups have the general formula —NHCHR^{A}C(O)NHCHR^{B}C(O)—, where R^{A} and R^{B} are the R groups of the two adjacent amino acids.

[0141] Other cleavable linkers may be cleaved by nucleophilic/basic reagents, reducing reagents, photo-irradiation, and electrophilic/acidic reagents. See, e.g., Leriche, Geoffray, et al., Cleavable Linkers in Chemical Biology, Bioorganic & Medicinal Chemistry 20 (2012) 571-582.

[0142] As described herein, a cleavable linking group is one which is sufficiently stable outside the cell, but which upon entry into a target cell is cleaved to release the two parts the linker is holding together. In one instance, the cleavable linking group is cleaved at least 10 times or more, or at least 100 times faster in the target cell or under a first reference condition (which can, e.g., be selected to mimic or represent intracellular conditions) than in the blood of a subject, or under a second reference condition (which can, e.g., be selected to mimic or represent conditions found in the blood or serum).

[0143] In some cases, the cleavable linker which links the ELP to the RBPs is an acid-labile linking group. Upon entering the endosomal compartment, the acid-labile linking group is hydrolyzed, thereby releasing the ELP from the RBPs. In some cases, the cleavable linker which links the ELP from the RBPs is cleaved under reducing conditions upon entering the endosomal compartment. It is understood that any convenient cleavable linker capable of being cleaved to release the ELP once the cargo is inside the endosomal compartment, can be utilized in the subject systems and methods. The released ELP triggers endosomal disruption, allowing release of the cargo RNA into the cytoplasm.

[0144] More generally, the subject cleavable linking groups may be susceptible to cleavage agents, e.g., pH, redox potential or the presence of degradative molecules. Examples of such degradative agents include: redox agents which are selected for particular substrates or which have no substrate specificity, including, e.g., oxidative or reductive enzymes or reductive agents such as mercaptans, present in cells, that can degrade a redox cleavable linking group by reduction; esterases; endosomes or agents that can create an acidic environment, e.g., those that result in a pH of five or lower; enzymes that can hydrolyze or degrade an acid cleavable linking group by acting as a general acid, peptidases (which can be substrate specific), and phosphatases.

[0145] In certain cases, the cleavable linker between the ELP and the modified RBPs hydrolyzes at acidic pH (e.g. the acidic conditions within the endosomal compartment). As used herein, the expression “acidic pH” means a pH of 6.0 or less (e.g., less than about 6.0, less than about 5.5, less than about 5.0, etc.). The expression “acidic pH” includes pH values of about 6.0, 5.95, 5.9, 5.85, 5.8, 5.75, 5.7, 5.65, 5.6, 5.55, 5.5, 5.45, 5.4, 5.35, 5.3, 5.25, 5.2, 5.15, 5.1, 5.05, 5.0, 4.9, 4.85, 4.80, 4.75, 4.7, 4.65, 4.6, 4.55, 4.5 or less. In certain cases, the cleavable linker is cleaved rapidly at a pH of about 5.0, but slowly at a pH of about 7.4. Accordingly, any convenient cleavable linker which hydrolyzes under acidic conditions to release the ELP from the RBP (e.g. as described herein) may find use in the present invention. Examples of acid cleavable linking groups include but are not limited to hydrazones, esters, and esters of amino acids. Acid cleavable groups can have the general formula-C(═N—)N—, —C(O)O—, or —OC(O)—.

[0146] In general, the pH of human serum is 7.4, while the average intracellular pH is slightly lower, ranging from about 7.1-7.3. Endosomes have a more acidic pH, e.g., in the range of about 5.5-6.0, and lysosomes have an even more acidic pH at around 5.0. Some linkers will have a cleavable linking group that is cleaved at a preferred pH.

[0147] Some other linkers can include a cleavable linking group that is cleavable by a particular enzyme. Ester-based cleavable linking groups are cleaved by enzymes such as esterases and amidases in cells. Examples of ester-based cleavable linking groups include but are not limited to esters of alkylene, alkenylene and alkynylene groups. Ester cleavable linking groups have the general formula —C(O)O—, or —OC(O)—. In some cases, the carbon attached to the oxygen of the ester (the alkoxy group) is an aryl group, substituted alkyl group, or tertiary alkyl group such as dimethyl pentyl or t-butyl.

[0148] In certain instances, the cleavable linker between the ELP and the modified RBPs is cleaved under reducing conditions. In certain instances, the subject endosomal disruptor is cleaved by a reducing agent at acidic pH (e.g. the acidic conditions within the endosomal compartment). In certain cases, the cleavable linker is cleaved rapidly by glutathione reduction at the acidic pH of the endosomal compartment. Accordingly, any convenient cleavable linker that is capable of cleavage under reducing conditions may find use in the present invention. n certain instances, the cleavable linker is a disulfide. However, it will be understood that any convenient cleavable linker that is capable of cleavage within the endosomal compartment can be utilized in the subject endosomal disruptors.

[0149] In one instance, the cleavable linkers include redox cleavable linkers, such as a disulfide group (—S—S—) and phosphate cleavable linkers, such as, e.g., —O—P(O)(OR)—O—, —O—P(S)(OR)—O—, —O—P(S)(SR)—O—, —S—P(OXOR)—O—, —O—P(O)(OR)—S—, —S—P(O)(OR)—S—, —O—P(S)(OR)—S—, —S—P(S)OR)—O—, —O—P(O)(R)—, —O—P(S)R)—O—, —S—P(O)(R)—O—, —S—P(S)(R)—O—, —S—P(O)(R)—S—, —OP(S)(R)—S—, wherein R is hydrogen or alkyl.

[0150] In one instance, the redox cleavable linking group is a disulfide linking group (—S—S—). To determine if a candidate cleavable linking group is a suitable “reductively cleavable linking group,” any of a variety of well-known methods can be used. For example, a candidate can be evaluated by incubation with dithiothreitol (DTT), or other reducing agent using reagents know in the art, which mimic the rate of cleavage which would be observed in a cell, e.g., a target cell. The candidates can also be evaluated under conditions which are selected to mimic blood or serum conditions. As an example, candidate compounds are cleaved by at most 10% in the blood. In some cases, useful candidate compounds are degraded at least 2, 4, 10 or 100 times faster in the cell (or under in vitro conditions selected to mimic intracellular conditions) as compared to blood (or under in vitro conditions selected to mimic extracellular conditions). The rate of cleavage of candidate compounds can be determined using standard enzyme kinetics assays under conditions chosen to mimic intracellular media and compared to conditions chosen to mimic extracellular media.

[0151] In some cases, the cleavable linker is phosphate-based. The phosphate-based cleavable linking groups are cleaved by agents that degrade or hydrolyze the phosphate group. An example of an agent that cleaves phosphate groups in cells are enzymes such as phosphatases in cells. Examples of phosphate-based linking groups are —O—P(O)(ORk)-O—, —O—P(S)(ORk)-O—, —O—P(S)(SRk)-O—, —S—P(O)(ORk)-O—, —O—P(O)(ORk)-S—, —S—P(O)(ORk)-S—, —O—P(S)(ORk)-S—, —S—P(S)(ORk)-O—, —O—P(O)(Rk)-O—, —O—P(S)(Rk)-O—, —S—P(O)(Rk)-O—, —S—P(S)(Rk)-O—, —S—P(O)(Rk)-S—, —O—P(S)(Rk)-S—. Suitable phosphate-based linking groups include —O—P(O)(OH)—O—, —O—P(S)(OH)—O—, —O—P(S)(SH)—O—, —S—P(O)(OH)—O—, —O—P(O)(OH)—S—, —S—P(O)(OH)—S—, —O—P(S)(OH)—S—, —S—P(S)(OH)—O—, —O—P(O)(H)—O—, —O—P(S)(H)—O—, —S—P(O)(H)—O—, —S—P(S)(H)—O—, —S—P(O)(H)—S—, —O—P(S)(H)—S—. For example, in some cases, the phosphate-based linking group is —O—P(O)(OH)—O—.

[0152] In some cases, the cleavable linker between the endosomolytic peptide and the modified RBPs cleaves within a timescale of 1 to 20 minutes at acidic pH. In some cases, the cleavable linker cleaves in less than 20 minutes, such as 15 minutes or less, 10 minutes or less, 5 minutes or less, 3 minutes or less. In certain cases, the cleavable linker is cleaved in a timescale from 10 to 15 minutes or less, such as 5 to 10 minutes or less. In some cases, the cleavable linker of the subject endosomal disruptors has a half-life of 2.5 minutes or less at a pH of about 5.

[0153] By contrast, at neutral pH, the cleavable linkers between the ELP and the modified RBPs may be stable for several hours.

[0154] In some cases, the subject released ELPs are metabolically stable (e.g., remain substantially intact in vivo during the half-life of the peptide). In certain cases, the peptides have a half-life (e.g., an in vivo half-life) of 5 minutes or more, such as 10 minutes or more, 12 minutes or more, 15 minutes or more, 20 minutes or more, 30 minutes or more, 60 minutes or more, 2 hours or more, 6 hours or more, 12 hours or more, 24 hours or more, or even more. In some cases, the cleavable linker between the ELP and the modified RBPs has a half-life of greater than 4 hours at a pH of about 7.4.

[0155] As used herein, the expression “neutral pH” means a pH of about 7.0 to about 7.4. The expression “neutral pH” includes pH values of about 7.0, 7.05, 7.1, 7.15, 7.2, 7.25, 7.3, 7.35, and 7.4.

[0156] In general, the suitability of a candidate cleavable linking group can be evaluated by testing the ability of a degradative agent (or condition) to cleave the candidate linking group. The candidate cleavable linking group can also be tested for the ability to resist cleavage in the blood or when in contact with other non-target tissue. Thus, one can determine the relative susceptibility to cleavage between a first and a second condition, where the first is selected to be indicative of cleavage in a target cell and the second is selected to be indicative of cleavage in other tissues or biological fluids, e.g., blood or serum. The evaluations can be carried out in cell free systems, in cells, in cell culture, in organ or tissue culture, or in whole animals. It may be useful to make initial evaluations in cell-free or culture conditions and to confirm by further evaluations in whole animals.

### Cargo RNA

[0157] Suitable cargo RNA includes any convenient RNA sequence that has been modified to include a segment (stretch of nucleotides) that binds to the RBP portion of a modified RBP present in a system of the present disclosure. In some cases, the cargo RNA is a guide RNA. In some cases, the cargo RNA is a guide RNA that comprises a tracrRNA, e.g., a stretch of nucleotides that binds to an RNA-guided CRISRP/Cas effector polypeptide. Where the cargo RNA is a guide RNA, in some cases, the guide RNA is a single-molecule guide RNA (“single-guide RNA”). In some cases, the cargo RNA is a short interfering RNA (siRNA), a short hairpin RNA (shRNA), a ribozyme, an mRNA, a microRNA (miRNA), a small temporal RNA (stRNA), an antisense RNA, a small RNA-induced gene activation (RNAa), a small activating RNA (saRNA), a small nuclear RNA (snRNA), a small nucleolar RNA (snoRNA), SmY RNA, a small Cajal body-specific RNA (scaRNA), spliced leader RNA (SL RNA), cis-natural antisense transcript RNA (cis-NAT), long non-coding RNA (lncRNA), piwi-interacting RNA (piRNA), trans-acting RNA (tasiRNA), repeat associated RNA (rasiRNA), a telomerase RNA component (TERC), and the like. In some cases, the cargo RNA comprises a nucleotide sequence that encodes a polypeptide. In some cases, the cargo RNA does not encode a polypeptide. In some cases, the cargo RNA is a telomerase RNA component (TERC). In some cases, the RNA is an lncRNA.

### RBP Binding Sites

[0158] As noted above, a system of the present disclosure comprises a modified cargo RNA complexed to a modified RBP, where the modified cargo RNA comprises a cargo RNA modified to include one or more RBP binding sites that are bound by the RBP present in the modified RBP.

[0159] In some cases, a modified cargo RNA comprises a single RBP binding site. In some cases, a modified cargo RNA comprises 2 RBP binding sites. In some cases, a modified cargo RNA comprises 3 RBP binding sites. In some cases, a modified cargo RNA comprises 4 RBP binding sites. In some cases, a modified cargo RNA comprises 5 RBP binding sites.

[0160] In some cases, the RBP binding site is a contiguous stretch of from 4 nucleotides to 10 nucleotides, e.g., a contiguous stretch of 4 nucleotides (nt), 5 nt, 6 nt, 7 nt, 8 nt, 9 nt, or 10 nt.

[0161] Binding sites bound by a given RBP are known in the art. See, e.g., Laird-Offinga and Belasco (1995) Proc Natl Acad Sci USA 92: 11859-63; Hall and Stump (1992) Nucl. Acids Res. 20:4283; Oubridge et al. (1994) Nature 372:432.

[0162] For example, U1A recognizes the sequence AUUGCAC (SEQ ID NO:852). The AUUGCAC (SEQ ID NO:852) sequence may be flanked on the 5′ and 3′ ends by a stretch of nucleotides that form a base-paired region important to maintain a stem-loop structure. A U2B polypeptide (e.g., a U2B N-terminal fragment) also can bind the sequence AUUGCAC (SEQ ID NO:852). For example, a U2B polypeptide can bind the nucleotide sequence: CCUGGUAUUGCAGUACCUCCAGGU (SEQ ID NO:853), where the nucleotide sequences flanking AUUGCAG form the stem of a stem-loop structure. As another example, an MS2 coat protein recognizes a stem-loop structure comprising the sequence 5′-AAACAUGAGGAUUACCCAUGUCG-3′ (SEQ ID NO:854), or 5′-AAACAUGAGGAUCACCCAUGUCG-3′ (SEQ ID NO:855), where the AUUA (SEQ ID NO:856) or AUCA (SEQ ID NO:857) portion of the sequence is recognized with sequence specificity, and the remainder of the sequence is recognized with structure specificity. As another example, a PP7 viral coat protein recognizes the following nucleotide sequence GGCACAGAAGAAGAUAUGGCUUCGUGCC (SEQ ID NO:858), where sequence-specific recognition takes place at the underlined nucleotides; the remainder of the structure is recognized in a structure-specific manner. As another example, in PABP, the N-terminal 2 RNA recognition motifs recognized adenine-rich sequences, e.g., of at least 6 nucleotides in length (e.g., AAAAAA (SEQ ID NO:860)) (see, e.g., Deo et al. (1999) Cell 98:835). As another example, a boxB polypeptide (e.g., a polypeptide comprising NAKTRRHERRRKLAIERDT (SEQ ID NO:859)) can recognize the sequence GCCCUGAAAAAGGGC (SEQ ID NO:861). As another example, Csy4 recognizes the sequence ACUGCCGUAUAGGCAGC (SEQ ID NO:862). RBPs of the Hu family of RBPs include N-terminal domains that bind to AU-rich regions of ssRNAs; e.g., UUUUAUUUU (SEQ ID NO:863), UAUUUAUUUA (SEQ ID NO:864), and the like. HK-type RBPs, such as Nova-2 HK3 (residues 406-492) recognize the sequence GAGGACCUAGAUCACCCCUC (SEQ ID NO:865). A NusA polypeptide (e.g., residues 184-333) can recognize the sequence GAACUCAAUAG (SEQ ID NO:866).

[0163] As non-limiting examples, a single-guide RNA (sgRNA), modified to include a U1A binding site, can comprise a nucleotide sequence as follows (where: i) “[spacer]” refers to the approximately 20-nucleotide region that hybridizes to a target nucleic acid; ii) underlined nucleotides represent the sgRNA scaffold; iii) bold and double underlined nucleotides represent a based-paired region that provides for maintenance of stem-loop structure, but that is not recognized in a sequence-specific manner; v) italicized and underlined nucleotides (AUUGCAC; SEQ ID NO:852) represent the single-stranded region of RNA recognized by U1A in a sequence-specific manner; the downstream “UCC” sequence is essentially a single-stranded RNA linker that promotes favorable binding geometry of the loop and v) italicized nucleotides represent nucleotides (GCGAGGCUAAGU (SEQ ID NO:867); ACAGCACAAGCCCGCU (SEQ ID NO:868); and AGCAGGGAACUCGC (SEQ ID NO:869)) introduced to form a three-way junction):

“a”)
(SEQ ID NO: 870)
[spacer]GUUUAAGAGCUAU [symbol] AUUGCACUCC [symbol] GAUCCAUAGCAAGU
UUAAAUAAGGCUAGUCCGUUAUCAACUUGAAAAAGUGGCACCGAGUCGGU
GCUUUUUUU;
“b”)
(SEQ ID NO: 871)
[spacer]GUUUAAGAGCUAUGCUGGAAACAGCAUAGCAAGUUUAAAUAA
GGCUAGUCCGUUAUCAACUU [symbol] GCAAUCCAUUGCACUCC [symbol] AAGUGG
CACCGAGUCGGUGCUUUUUUU;
“c”)
(SEQ ID NO: 872)
[spacer]GUUUAAGAGCUAUGCUGGAAACAGCAUAGCAAGUUUAAAUAA
GGCUAGUCCGUUAUCAACUUGAAAAAGUGGCACCGAGUCGGUGCAUCAUC [symbol]
AUUGCACUCC [symbol] UUUUUUU;
“aa”)
(SEQ ID NO: 873)
[spacer]GUUUAAGAGCUAUGCGAGGCUAAGU [symbol] AUUGCACUCC [symbol] A
CAGCACAAGCCCGCU [symbol] UUGCACUCC [symbol] AGCAGGGAACUCGCAUAGC
AAGUUUAAAUAAGGCUAGUCCGUUAUCAACUUGAAAAAGUGGCACCGAGU
CGGUGCUUUUUUU;
and
bb)
(SEQ ID NO: 874)
[spacer]GUUUAAGAGCUAUGCUGGAAACAGCAUAGCAAGUUUAAAUAA
GGCUAGUCCGUUAUCAACUUGCGAGGCUAAGU [symbol] AUUGCACUCC [symbol] AC
AGCACAAGCCCGCU [symbol] AUUGCACUCC [symbol] [symbol] AGCAGGGAACUCGCAAGUGG
CACCGAGUCGGUGCUUUUUUU.
“bub”)
(SEQ ID NO: 923)
[spacer]GUUUAAGAGCUAUGCUGGAAACAGCAUAGCAAGUUUAAAUAA
GGCUAGUCCGUUAUCAACUUGUCGAGGCUAAGUCGCAUUGCACUCCGCGA
CAGCACAAGCCCGCUGCCAUUGCACUCCGGCAGCAGGGAACUCGUCAAGU
GGCACCGAGUCGGUGCUUUUUUU.

### Guide RNA

[0164] In some cases, the cargo RNA is a guide RNA. Guide RNAs suitable for inclusion in a system of the present disclosure include: i) a targeting segment comprising a nucleotide sequence that hybridizes to a nucleotide sequence in a target nucleic acid; and ii) an activation segment comprising a nucleotide sequence that binds to an activates an RNA-guided CRISPR/Cas effector polypeptide. In some cases, the RNA-guided CRISPR/Cas effector polypeptide is a class 2 CRISPR/Cas effector polypeptide. In certain cases, the class 2 CRISPR/Cas effector polypeptide is a type II CRISPR/Cas effector polypeptide. In certain cases, the class 2 CRISPR/Cas effector polypeptide is a Cas9 protein and the corresponding CRISPR/Cas guide RNA is a Cas9 guide RNA. In certain other cases, the class 2 CRISPR/Cas effector polypeptide is a type V or type VI CRISPR/Cas effector polypeptide. In some cases, the class 2 CRISPR/Cas effector polypeptide is a Cpf1 protein, a C2c1 protein, a C2c3 protein or a C2c2 protein. In some cases, the class 2 CRISPR/Cas effector polypeptide is a Cas12 enzyme. In other instances, the class 2 CRISPR/Cas effector enzyme is a Cas13 enzyme. In yet other cases, the class 2 CRISPR/Cas effector polypeptide is a base editor. Non-limiting examples of base editors can be found in Rees & Liu et al. (Rees & Liu, Nat Rev Genet. 2018 December; 19(12):770-788. doi: 10.1038/s41576-018-0059-1), which is hereby incorporated by reference in its entirety. In some cases, the class 2 CRISPR/Cas effector polypeptide is a CRISPR-mediated activator (CRISPRa). In some cases, the class 2 CRISPR/Cas effector polypeptide is a CRISPR interferer (CRISPRi). Non-limiting examples of CRISPRa and CRISPRi can be found in Dominguez et al. (Dominguez et al. Nat Rev Mol Cell Biol. (2016)17:5-15. DOI: 10.1038/nrm.2015.2), which is hereby incorporated by reference in its entirety.

[0165] A nucleic acid molecule that binds to a Cas9 protein and targets the complex to a specific location within a target nucleic acid is referred to herein as a “Cas9 guide RNA.”

[0166] A Cas9 guide RNA (can be said to include two segments, a first segment (referred to herein as a “targeting segment”); and a second segment (referred to herein as a “protein-binding segment”). By “segment” it is meant a segment/section/region of a molecule, e.g., a contiguous stretch of nucleotides in a nucleic acid molecule. A segment can also mean a region/section of a complex such that a segment may comprise regions of more than one molecule.

[0167] The first segment (targeting segment) of a Cas9 guide RNA includes a nucleotide sequence (a guide sequence) that is complementary to (and therefore hybridizes with) a specific sequence (a target site) within a target nucleic acid (e.g., a target ssRNA, a target ssDNA, the complementary strand of a double stranded target DNA, etc.). The protein-binding segment (or “protein-binding sequence”) interacts with (binds to) a Cas9 polypeptide. The protein-binding segment of a subject Cas9 guide RNA includes two complementary stretches of nucleotides that hybridize to one another to form a double stranded RNA duplex (dsRNA duplex). Site-specific binding and/or cleavage of a target nucleic acid (e.g., genomic DNA) can occur at locations (e.g., target sequence of a target locus) determined by base-pairing complementarity between the Cas9 guide RNA (the guide sequence of the Cas9 guide RNA) and the target nucleic acid.

[0168] A Cas9 guide RNA and a Cas9 protein form a complex (e.g., bind via non-covalent interactions). The Cas9 guide RNA provides target specificity to the complex by including a targeting segment, which includes a guide sequence (a nucleotide sequence that is complementary to a sequence of a target nucleic acid). The Cas9 protein of the complex provides the site-specific activity (e.g., cleavage activity or an activity provided by the Cas9 protein when the Cas9 protein is a Cas9 fusion polypeptide, i.e., has a fusion partner). In other words, the Cas9 protein is guided to a target nucleic acid sequence (e.g. a target sequence in a chromosomal nucleic acid, e.g., a chromosome; a target sequence in an extrachromosomal nucleic acid, e.g. an episomal nucleic acid, a minicircle, an ssRNA, an ssDNA, etc.; a target sequence in a mitochondrial nucleic acid; a target sequence in a chloroplast nucleic acid; a target sequence in a plasmid; a target sequence in a viral nucleic acid; etc.) by virtue of its association with the Cas9 guide RNA.

[0169] The “guide sequence” also referred to as the “targeting sequence” of a Cas9 guide RNA can be modified so that the Cas9 guide RNA can target a Cas9 protein to any desired sequence of any desired target nucleic acid, with the exception that the protospacer adjacent motif (PAM) sequence can be taken into account. Thus, for example, a Cas9 guide RNA can have a targeting segment with a sequence (a guide sequence) that has complementarity with (e.g., can hybridize to) a sequence in a nucleic acid in a eukaryotic cell, e.g., a viral nucleic acid, a eukaryotic nucleic acid (e.g., a eukaryotic chromosome, chromosomal sequence, a eukaryotic RNA, etc.), and the like.

[0170] In some cases, a Cas9 guide RNA includes two separate nucleic acid molecules: an “activator” and a “targeter” and is referred to herein as a “dual Cas9 guide RNA”, a “double-molecule Cas9 guide RNA”, or a “two-molecule Cas9 guide RNA” a “dual guide RNA”, or a “dgRNA.” In some cases, the activator and targeter are covalently linked to one another (e.g., via intervening nucleotides) and the guide RNA is referred to as a “single guide RNA”, a “Cas9 single guide RNA”, a “single-molecule Cas9 guide RNA,” or a “one-molecule Cas9 guide RNA”, or simply “sgRNA.”

[0171] A Cas9 guide RNA comprises a crRNA-like (“CRISPR RNA”/“targeter”/“crRNA”/“crRNA repeat”) molecule and a corresponding tracrRNA-like (“trans-acting CRISPR RNA”/“activator”/“tracrRNA”) molecule. A crRNA-like molecule (targeter) comprises both the targeting segment (single stranded) of the Cas9 guide RNA and a stretch (“duplex-forming segment”) of nucleotides that forms one half of the dsRNA duplex of the protein-binding segment of the Cas9 guide RNA. A corresponding tracrRNA-like molecule (activator/tracrRNA) comprises a stretch of nucleotides (duplex-forming segment) that forms the other half of the dsRNA duplex of the protein-binding segment of the guide nucleic acid. In other words, a stretch of nucleotides of a crRNA-like molecule are complementary to and hybridize with a stretch of nucleotides of a tracrRNA-like molecule to form the dsRNA duplex of the protein-binding domain of the Cas9 guide RNA. As such, each targeter molecule can be said to have a corresponding activator molecule (which has a region that hybridizes with the targeter). The targeter molecule additionally provides the targeting segment. Thus, a targeter and an activator molecule (as a corresponding pair) hybridize to form a Cas9 guide RNA. The exact sequence of a given crRNA or tracrRNA molecule is characteristic of the species in which the RNA molecules are found. A subject dual Cas9 guide RNA can include any corresponding activator and targeter pair. In some cases, a guide RNA is a multicomponent guide RNA. In some cases, a system of 2 or more or 3 or more polynucleotides is used to complex with a Cas enzyme (e.g., three split-nexus Cas associated polynucleotides). Non-limiting examples of three split-nexus Cas associated polypeptides can be found in U.S. Patent Application Publication No. 20170335347, which is hereby incorporated by reference in its entirety.

[0172] The term “activator” or “activator RNA” is used herein to mean a tracrRNA-like molecule (tracrRNA: “trans-activating CRISPR RNA”) of a Cas9 dual guide RNA (and therefore of a Cas9 single guide RNA when the “activator” and the “targeter” are linked together by, e.g., intervening nucleotides). Thus, for example, a Cas9 guide RNA (dgRNA or sgRNA) comprises an activator fsequence (e.g., a tracrRNA sequence). A tracr molecule (a tracrRNA) is a naturally existing molecule that hybridizes with a CRISPR RNA molecule (a crRNA) to form a Cas9 dual guide RNA. The term “activator” is used herein to encompass naturally existing tracrRNAs, but also to encompass tracrRNAs with modifications (e.g., truncations, sequence variations, base modifications, backbone modifications, linkage modifications, etc.) where the activator retains at least one function of a tracrRNA (e.g., contributes to the dsRNA duplex to which Cas9 protein binds). In some cases the activator provides one or more stem loops that can interact with Cas9 protein. An activator can be referred to as having a tracr sequence (tracrRNA sequence) and in some cases is a tracrRNA, but the term “activator” is not limited to naturally existing tracrRNAs.

[0173] The term “targeter” or “targeter RNA” is used herein to refer to a crRNA-like molecule (crRNA: “CRISPR RNA”) of a Cas9 dual guide RNA (and therefore of a Cas9 single guide RNA when the “activator” and the “targeter” are linked together, e.g., by intervening nucleotides). Thus, for example, a Cas9 guide RNA (dgRNA or sgRNA) comprises a targeting segment (which includes nucleotides that hybridize with (are complementary to) a target nucleic acid, and a duplex-forming segment (e.g., a duplex forming segment of a crRNA, which can also be referred to as a crRNA repeat). Because the sequence of a targeting segment (the segment that hybridizes with a target sequence of a target nucleic acid) of a targeter is modified by a user to hybridize with a desired target nucleic acid, the sequence of a targeter will often be a non-naturally occurring sequence. However, the duplex-forming segment of a targeter (described in more detail below), which hybridizes with the duplex-forming segment of an activator, can include a naturally existing sequence (e.g., can include the sequence of a duplex-forming segment of a naturally existing crRNA, which can also be referred to as a crRNA repeat). Thus, the term targeter is used herein to distinguish from naturally occurring crRNAs, despite the fact that part of a targeter (e.g., the duplex-forming segment) often includes a naturally occurring sequence from a crRNA. However, the term “targeter” encompasses naturally occurring crRNAs.

[0174] A Cas9 guide RNA can also be said to include 3 parts: (i) a targeting sequence (a nucleotide sequence that hybridizes with a sequence of the target nucleic acid); (ii) an activator sequence (as described above)(in some cases, referred to as a tracr sequence); and (iii) a sequence that hybridizes to at least a portion of the activator sequence to form a double stranded duplex. A targeter has (i) and (iii); while an activator has (ii).

[0175] A Cas9 guide RNA (e.g. a dual guide RNA or a single guide RNA) can be comprised of any corresponding activator and targeter pair. In some cases, the duplex forming segments can be swapped between the activator and the targeter. In other words, in some cases, the targeter includes a sequence of nucleotides from a duplex forming segment of a tracrRNA (which sequence would normally be part of an activator) while the activator includes a sequence of nucleotides from a duplex forming segment of a crRNA (which sequence would normally be part of a targeter).

[0176] As noted above, a targeter comprises both the targeting segment (single stranded) of the Cas9 guide RNA and a stretch (“duplex-forming segment”) of nucleotides that forms one half of the dsRNA duplex of the protein-binding segment of the Cas9 guide RNA. A corresponding tracrRNA-like molecule (activator) comprises a stretch of nucleotides (a duplex-forming segment) that forms the other half of the dsRNA duplex of the protein-binding segment of the Cas9 guide RNA. In other words, a stretch of nucleotides of the targeter is complementary to and hybridizes with a stretch of nucleotides of the activator to form the dsRNA duplex of the protein-binding segment of a Cas9 guide RNA. As such, each targeter can be said to have a corresponding activator (which has a region that hybridizes with the targeter). The targeter molecule additionally provides the targeting segment. Thus, a targeter and an activator (as a corresponding pair) hybridize to form a Cas9 guide RNA. The particular sequence of a given naturally existing crRNA or tracrRNA molecule is characteristic of the species in which the RNA molecules are found. Examples of suitable activator and targeter are well known in the art. Targeting segment of a Cas9 guide RNA

[0177] The first segment of a subject guide nucleic acid includes a guide sequence (i.e., a targeting sequence)(a nucleotide sequence that is complementary to a sequence (a target site) in a target nucleic acid). In other words, the targeting segment of a subject guide nucleic acid can interact with a target nucleic acid (e.g., double stranded DNA (dsDNA)) in a sequence-specific manner via hybridization (i.e., base pairing). As such, the nucleotide sequence of the targeting segment may vary (depending on the target) and can determine the location within the target nucleic acid that the Cas9 guide RNA and the target nucleic acid will interact. The targeting segment of a Cas9 guide RNA can be modified (e.g., by genetic engineering)/designed to hybridize to any desired sequence (target site) within a target nucleic acid (e.g., a eukaryotic target nucleic acid such as genomic DNA).

[0178] The targeting segment can have a length of 7 or more nucleotides (nt) (e.g., 8 or more, 9 or more, 10 or more, 12 or more, 15 or more, 20 or more, 25 or more, 30 or more, or 40 or more nucleotides). In some cases, the targeting segment can have a length of from 7 to 100 nucleotides (nt) (e.g., from 7 to 80 nt, from 7 to 60 nt, from 7 to 40 nt, from 7 to 30 nt, from 7 to 25 nt, from 7 to 22 nt, from 7 to 20 nt, from 7 to 18 nt, from 8 to 80 nt, from 8 to 60 nt, from 8 to 40 nt, from 8 to 30 nt, from 8 to 25 nt, from 8 to 22 nt, from 8 to 20 nt, from 8 to 18 nt, from 10 to 100 nt, from 10 to 80 nt, from 10 to 60 nt, from 10 to 40 nt, from 10 to 30 nt, from 10 to 25 nt, from 10 to 22 nt, from 10 to 20 nt, from 10 to 18 nt, from 12 to 100 nt, from 12 to 80 nt, from 12 to 60 nt, from 12 to 40 nt, from 12 to 30 nt, from 12 to 25 nt, from 12 to 22 nt, from 12 to 20 nt, from 12 to 18 nt, from 14 to 100 nt, from 14 to 80 nt, from 14 to 60 nt, from 14 to 40 nt, from 14 to 30 nt, from 14 to 25 nt, from 14 to 22 nt, from 14 to 20 nt, from 14 to 18 nt, from 16 to 100 nt, from 16 to 80 nt, from 16 to 60 nt, from 16 to 40 nt, from 16 to 30 nt, from 16 to 25 nt, from 16 to 22 nt, from 16 to 20 nt, from 16 to 18 nt, from 18 to 100 nt, from 18 to 80 nt, from 18 to 60 nt, from 18 to 40 nt, from 18 to 30 nt, from 18 to 25 nt, from 18 to 22 nt, or from 18 to 20 nt).

[0179] The nucleotide sequence (the targeting sequence) of the targeting segment that is complementary to a nucleotide sequence (target site) of the target nucleic acid can have a length of 10 nt or more. For example, the targeting sequence of the targeting segment that is complementary to a target site of the target nucleic acid can have a length of 12 nt or more, 15 nt or more, 18 nt or more, 19 nt or more, or 20 nt or more. In some cases, the nucleotide sequence (the targeting sequence) of the targeting segment that is complementary to a nucleotide sequence (target site) of the target nucleic acid has a length of 12 nt or more. In some cases, the nucleotide sequence (the targeting sequence) of the targeting segment that is complementary to a nucleotide sequence (target site) of the target nucleic acid has a length of 18 nt or more.

[0180] For example, the targeting sequence of the targeting segment that is complementary to a target sequence of the target nucleic acid can have a length of from 10 to 100 nucleotides (nt) (e.g., from 10 to 90 nt, from 10 to 75 nt, from 10 to 60 nt, from 10 to 50 nt, from 10 to 35 nt, from 10 to 30 nt, from 10 to 25 nt, from 10 to 22 nt, from 10 to 20 nt, from 12 to 100 nt, from 12 to 90 nt, from 12 to 75 nt, from 12 to 60 nt, from 12 to 50 nt, from 12 to 35 nt, from 12 to 30 nt, from 12 to 25 nt, from 12 to 22 nt, from 12 to 20 nt, from 15 to 100 nt, from 15 to 90 nt, from 15 to 75 nt, from 15 to 60 nt, from 15 to 50 nt, from 15 to 35 nt, from 15 to 30 nt, from 15 to 25 nt, from 15 to 22 nt, from 15 to 20 nt, from 17 to 100 nt, from 17 to 90 nt, from 17 to 75 nt, from 17 to 60 nt, from 17 to 50 nt, from 17 to 35 nt, from 17 to 30 nt, from 17 to 25 nt, from 17 to 22 nt, from 17 to 20 nt, from 18 to 100 nt, from 18 to 90 nt, from 18 to 75 nt, from 18 to 60 nt, from 18 to 50 nt, from 18 to 35 nt, from 18 to 30 nt, from 18 to 25 nt, from 18 to 22 nt, or from 18 to 20 nt). In some cases, the targeting sequence of the targeting segment that is complementary to a target sequence of the target nucleic acid has a length of from 15 nt to 30 nt. In some cases, the targeting sequence of the targeting segment that is complementary to a target sequence of the target nucleic acid has a length of from 15 nt to 25 nt. In some cases, the targeting sequence of the targeting segment that is complementary to a target sequence of the target nucleic acid has a length of from 18 nt to 30 nt. In some cases, the targeting sequence of the targeting segment that is complementary to a target sequence of the target nucleic acid has a length of from 18 nt to 25 nt. In some cases, the targeting sequence of the targeting segment that is complementary to a target sequence of the target nucleic acid has a length of from 18 nt to 22 nt. In some cases, the targeting sequence of the targeting segment that is complementary to a target site of the target nucleic acid is 20 nucleotides in length. In some cases, the targeting sequence of the targeting segment that is complementary to a target site of the target nucleic acid is 19 nucleotides in length.

[0181] The percent complementarity between the targeting sequence (guide sequence) of the targeting segment and the target site of the target nucleic acid can be 60% or more (e.g., 65% or more, 70% or more, 75% or more, 80% or more, 85% or more, 90% or more, 95% or more, 97% or more, 98% or more, 99% or more, or 100%). In some cases, the percent complementarity between the targeting sequence of the targeting segment and the target site of the target nucleic acid is 100% over the seven contiguous 5′-most nucleotides of the target site of the target nucleic acid. In some cases, the percent complementarity between the targeting sequence of the targeting segment and the target site of the target nucleic acid is 60% or more over about 20 contiguous nucleotides. In some cases, the percent complementarity between the targeting sequence of the targeting segment and the target site of the target nucleic acid is 100% over the fourteen contiguous 5′-most nucleotides of the target site of the target nucleic acid and as low as 0% or more over the remainder. In such a case, the targeting sequence can be considered to be 14 nucleotides in length. In some cases, the percent complementarity between the targeting sequence of the targeting segment and the target site of the target nucleic acid is 100% over the seven contiguous 5′-most nucleotides of the target site of the target nucleic acid and as low as 0% or more over the remainder. In such a case, the targeting sequence can be considered to be 20 nucleotides in length.

[0182] In some cases, the percent complementarity between the targeting sequence of the targeting segment and the target site of the target nucleic acid is 100% over the 7 contiguous 5′-most nucleotides of the target site of the target nucleic acid (which can be complementary to the 3′-most nucleotides of the targeting sequence of the Cas9 guide RNA). In some cases, the percent complementarity between the targeting sequence of the targeting segment and the target site of the target nucleic acid is 100% over the 8 contiguous 5′-most nucleotides of the target site of the target nucleic acid (which can be complementary to the 3′-most nucleotides of the targeting sequence of the Cas9 guide RNA). In some cases, the percent complementarity between the targeting sequence of the targeting segment and the target site of the target nucleic acid is 100% over the 9 contiguous 5′-most nucleotides of the target site of the target nucleic acid (which can be complementary to the 3′-most nucleotides of the targeting sequence of the Cas9 guide RNA). In some cases, the percent complementarity between the targeting sequence of the targeting segment and the target site of the target nucleic acid is 100% over the 10 contiguous 5′-most nucleotides of the target site of the target nucleic acid (which can be complementary to the 3′-most nucleotides of the targeting sequence of the Cas9 guide RNA). In some cases, the percent complementarity between the targeting sequence of the targeting segment and the target site of the target nucleic acid is 100% over the 17 contiguous 5′-most nucleotides of the target site of the target nucleic acid (which can be complementary to the 3′-most nucleotides of the targeting sequence of the Cas9 guide RNA). In some cases, the percent complementarity between the targeting sequence of the targeting segment and the target site of the target nucleic acid is 100% over the 18 contiguous 5′-most nucleotides of the target site of the target nucleic acid (which can be complementary to the 3′-most nucleotides of the targeting sequence of the Cas9 guide RNA). In some cases, the percent complementarity between the targeting sequence of the targeting segment and the target site of the target nucleic acid is 60% or more (e.g., e.g., 65% or more, 70% or more, 75% or more, 80% or more, 85% or more, 90% or more, 95% or more, 97% or more, 98% or more, 99% or more, or 100%) over about 20 contiguous nucleotides.

[0183] In some cases, the percent complementarity between the targeting sequence of the targeting segment and the target site of the target nucleic acid is 100% over the 7 contiguous 5′-most nucleotides of the target site of the target nucleic acid and as low as 0% or more over the remainder. In such a case, the targeting sequence can be considered to be 7 nucleotides in length. In some cases, the percent complementarity between the targeting sequence of the targeting segment and the target site of the target nucleic acid is 100% over the 8 contiguous 5′-most nucleotides of the target site of the target nucleic acid and as low as 0% or more over the remainder. In such a case, the targeting sequence can be considered to be 8 nucleotides in length. In some cases, the percent complementarity between the targeting sequence of the targeting segment and the target site of the target nucleic acid is 100% over the 9 contiguous 5′-most nucleotides of the target site of the target nucleic acid and as low as 0% or more over the remainder. In such a case, the targeting sequence can be considered to be 9 nucleotides in length. In some cases, the percent complementarity between the targeting sequence of the targeting segment and the target site of the target nucleic acid is 100% over the 10 contiguous 5′-most nucleotides of the target site of the target nucleic acid and as low as 0% or more over the remainder. In such a case, the targeting sequence can be considered to be 10 nucleotides in length. In some cases, the percent complementarity between the targeting sequence of the targeting segment and the target site of the target nucleic acid is 100% over the 11 contiguous 5′-most nucleotides of the target site of the target nucleic acid and as low as 0% or more over the remainder. In such a case, the targeting sequence can be considered to be 11 nucleotides in length. In some cases, the percent complementarity between the targeting sequence of the targeting segment and the target site of the target nucleic acid is 100% over the 12 contiguous 5′-most nucleotides of the target site of the target nucleic acid and as low as 0% or more over the remainder. In such a case, the targeting sequence can be considered to be 12 nucleotides in length. In some cases, the percent complementarity between the targeting sequence of the targeting segment and the target site of the target nucleic acid is 100% over the 13 contiguous 5′-most nucleotides of the target site of the target nucleic acid and as low as 0% or more over the remainder. In such a case, the targeting sequence can be considered to be 13 nucleotides in length. In some cases, the percent complementarity between the targeting sequence of the targeting segment and the target site of the target nucleic acid is 100% over the 14 contiguous 5′-most nucleotides of the target site of the target nucleic acid and as low as 0% or more over the remainder. In such a case, the targeting sequence can be considered to be 14 nucleotides in length. In some cases, the percent complementarity between the targeting sequence of the targeting segment and the target site of the target nucleic acid is 100% over the 17 contiguous 5′-most nucleotides of the target site of the target nucleic acid and as low as 0% or more over the remainder. In such a case, the targeting sequence can be considered to be 17 nucleotides in length. In some cases, the percent complementarity between the targeting sequence of the targeting segment and the target site of the target nucleic acid is 100% over the 18 contiguous 5′-most nucleotides of the target site of the target nucleic acid and as low as 0% or more over the remainder. In such a case, the targeting sequence can be considered to be 18 nucleotides in length.

[0184] Examples of various Cas9 proteins and Cas9 guide RNAs (as well as information regarding requirements related to protospacer adjacent motif (PAM) sequences present in targeted nucleic acids) can be found in the art, for example, see Jinek et al., Science. 2012 Aug. 17; 337(6096):816-21; Chylinski et al., RNA Biol. 2013 May; 10(5):726-37; Ma et al., Biomed Res Int. 2013; 2013:270805; Hou et al., Proc Natl Acad Sci USA. 2013 Sep. 24; 110(39):15644-9; Jinek et al., Elife. 2013; 2:e00471; Pattanayak et al., Nat Biotechnol. 2013 September; 31(9):839-43; Qi et al., Cell. 2013 Feb. 28; 152(5):1173-83; Wang et al., Cell. 2013 May 9; 153(4):910-8; Auer et al., Genome Res. 2013 Oct. 31; Chen et al., Nucleic Acids Res. 2013 Nov. 1; 41(20):e19; Cheng et al., Cell Res. 2013 October; 23(10):1163-71; Cho et al., Genetics. 2013 November; 195(3):1177-80; DiCarlo et al., Nucleic Acids Res. 2013 April; 41(7):4336-43; Dickinson et al., Nat Methods. 2013 October; 10(10):1028-34; Ebina et al., Sci Rep. 2013; 3:2510; Fujii et al., Nucleic Acids Res. 2013 Nov. 1; 41(20):e187; Hu et al., Cell Res. 2013 November; 23(11):1322-5; Jiang et al., Nucleic Acids Res. 2013 Nov. 1; 41(20):e188; Larson et al., Nat Protoc. 2013 November; 8(11):2180-96; Mali et al., Nat Methods. 2013 October; 10(10):957-63; Nakayama et al., Genesis. 2013 December; 51(12):835-43; Ran et al., Nat Protoc. 2013 November; 8(11):2281-308; Ran et al., Cell. 2013 Sep. 12; 154(6):1380-9; Upadhyay et al., G3 (Bethesda). 2013 Dec. 9; 3(12):2233-8; Walsh et al., Proc Natl Acad Sci USA. 2013 Sep. 24; 110(39):15514-5; Xie et al., Mol Plant. 2013 Oct. 9; Yang et al., Cell. 2013 Sep. 12; 154(6):1370-9; Briner et al., Mol Cell. 2014 Oct. 23; 56(2):333-9; and U.S. patents and patent applications: U.S. Pat. Nos. 8,906,616; 8,895,308; 8,889,418; 8,889,356; 8,871,445; 8,865,406; 8,795,965; 8,771,945; 8,697,359; 20140068797; 20140170753; 20140179006; 20140179770; 20140186843; 20140186919; 20140186958; 20140189896; 20140227787; 20140234972; 20140242664; 20140242699; 20140242700; 20140242702; 20140248702; 20140256046; 20140273037; 20140273226; 20140273230; 20140273231; 20140273232; 20140273233; 20140273234; 20140273235; 20140287938; 20140295556; 20140295557; 20140298547; 20140304853; 20140309487; 20140310828; 20140310830; 20140315985; 20140335063; 20140335620; 20140342456; 20140342457; 20140342458; 20140349400; 20140349405; 20140356867; 20140356956; 20140356958; 20140356959; 20140357523; 20140357530; 20140364333; and 20140377868; all of which are hereby incorporated by reference in their entirety.

### Guide RNAs Corresponding to Type V and Type VI CRISPR/Cas Endonucleases (e.g., Cpf1 Guide RNA)

[0185] A guide RNA that binds to a type V or type VI CRISPR/Cas protein (e.g., Cpf1, C2c1, C2c2, C2c3), and targets the complex to a specific location within a target nucleic acid is referred to herein generally as a “type V or type VI CRISPR/Cas guide RNA”. An example of a more specific term is a “Cpf1 guide RNA.”

[0186] A type V or type VI CRISPR/Cas guide RNA (e.g., cpf1 guide RNA) can have a total length of from 30 nucleotides (nt) to 200 nt, e.g., from 30 nt to 180 nt, from 30 nt to 160 nt, from 30 nt to 150 nt, from 30 nt to 125 nt, from 30 nt to 100 nt, from 30 nt to 90 nt, from 30 nt to 80 nt, from 30 nt to 70 nt, from 30 nt to 60 nt, from 30 nt to 50 nt, from 50 nt to 200 nt, from 50 nt to 180 nt, from 50 nt to 160 nt, from 50 nt to 150 nt, from 50 nt to 125 nt, from 50 nt to 100 nt, from 50 nt to 90 nt, from 50 nt to 80 nt, from 50 nt to 70 nt, from 50 nt to 60 nt, from 70 nt to 200 nt, from 70 nt to 180 nt, from 70 nt to 160 nt, from 70 nt to 150 nt, from 70 nt to 125 nt, from 70 nt to 100 nt, from 70 nt to 90 nt, or from 70 nt to 80 nt). In some cases, a type V or type VI CRISPR/Cas guide RNA (e.g., cpf1 guide RNA) has a total length of at least 30 nt (e.g., at least 40 nt, at least 50 nt, at least 60 nt, at least 70 nt, at least 80 nt, at least 90 nt, at least 100 nt, or at least 120 nt).

[0187] In some cases, a Cpf1 guide RNA has a total length of 35 nt, 36 nt, 37 nt, 38 nt, 39 nt, 40 nt, 41 nt, 42 nt, 43 nt, 44 nt, 45 nt, 46 nt, 47 nt, 48 nt, 49 nt, or 50 nt.

[0188] Like a Cas9 guide RNA, a type V or type VI CRISPR/Cas guide RNA (e.g., cpf1 guide RNA) can include a target nucleic acid-binding segment and a duplex-forming region (e.g., in some cases formed from two duplex-forming segments, i.e., two stretches of nucleotides that hybridize to one another to form a duplex).

[0189] The target nucleic acid-binding segment of a type V or type VI CRISPR/Cas guide RNA (e.g., cpf1 guide RNA) can have a length of from 15 nt to 30 nt, e.g., 15 nt, 16 nt, 17 nt, 18 nt, 19 nt, 20 nt, 21 nt, 22 nt, 23 nt, 24 nt, 25 nt, 26 nt, 27 nt, 28 nt, 29 nt, or 30 nt. In some cases, the target nucleic acid-binding segment has a length of 23 nt. In some cases, the target nucleic acid-binding segment has a length of 24 nt. In some cases, the target nucleic acid-binding segment has a length of 25 nt.

[0190] The guide sequence of a type V or type VI CRISPR/Cas guide RNA (e.g., cpf1 guide RNA) can have a length of from 15 nt to 30 nt (e.g., 15 to 25 nt, 15 to 24 nt, 15 to 23 nt, 15 to 22 nt, 15 to 21 nt, 15 to 20 nt, 15 to 19 nt, 15 to 18 nt, 17 to 30 nt, 17 to 25 nt, 17 to 24 nt, 17 to 23 nt, 17 to 22 nt, 17 to 21 nt, 17 to 20 nt, 17 to 19 nt, 17 to 18 nt, 18 to 30 nt, 18 to 25 nt, 18 to 24 nt, 18 to 23 nt, 18 to 22 nt, 18 to 21 nt, 18 to 20 nt, 18 to 19 nt, 19 to 30 nt, 19 to 25 nt, 19 to 24 nt, 19 to 23 nt, 19 to 22 nt, 19 to 21 nt, 19 to 20 nt, 20 to 30 nt, 20 to 25 nt, 20 to 24 nt, 20 to 23 nt, 20 to 22 nt, 20 to 21 nt, 15 nt, 16 nt, 17 nt, 18 nt, 19 nt, 20 nt, 21 nt, 22 nt, 23 nt, 24 nt, 25 nt, 26 nt, 27 nt, 28 nt, 29 nt, or 30 nt). In some cases, the guide sequence has a length of 17 nt. In some cases, the guide sequence has a length of 18 nt. In some cases, the guide sequence has a length of 19 nt. In some cases, the guide sequence has a length of 20 nt. In some cases, the guide sequence has a length of 21 nt. In some cases, the guide sequence has a length of 22 nt. In some cases, the guide sequence has a length of 23 nt. In some cases, the guide sequence has a length of 24 nt.

[0191] The guide sequence of a type V or type VI CRISPR/Cas guide RNA (e.g., cpf1 guide RNA) can have 100% complementarity with a corresponding length of target nucleic acid sequence. The guide sequence can have less than 100% complementarity with a corresponding length of target nucleic acid sequence. For example, the guide sequence of a type V or type VI CRISPR/Cas guide RNA (e.g., cpf1 guide RNA) can have 1, 2, 3, 4, or 5 nucleotides that are not complementary to the target nucleic acid sequence. For example, in some cases, where a guide sequence has a length of 25 nucleotides, and the target nucleic acid sequence has a length of 25 nucleotides, in some cases, the target nucleic acid-binding segment has 100% complementarity to the target nucleic acid sequence. As another example, in some cases, where a guide sequence has a length of 25 nucleotides, and the target nucleic acid sequence has a length of 25 nucleotides, in some cases, the target nucleic acid-binding segment has 1 non-complementary nucleotide and 24 complementary nucleotides with the target nucleic acid sequence. As another example, in some cases, where a guide sequence has a length of 25 nucleotides, and the target nucleic acid sequence has a length of 25 nucleotides, in some cases, the target nucleic acid-binding segment has 2 non-complementary nucleotides and 23 complementary nucleotides with the target nucleic acid sequence.

[0192] The duplex-forming segment of a type V or type VI CRISPR/Cas guide RNA (e.g., cpf1 guide RNA) (e.g., of a targeter RNA or an activator RNA) can have a length of from 15 nt to 25 nt (e.g., 15 nt, 16 nt, 17 nt, 18 nt, 19 nt, 20 nt, 21 nt, 22 nt, 23 nt, 24 nt, or 25 nt).

[0193] The RNA duplex of a type V or type VI CRISPR/Cas guide RNA (e.g., cpf1 guide RNA) can have a length of from 5 base pairs (bp) to 40 bp (e.g., from 5 to 35 bp, 5 to 30 bp, 5 to 25 bp, 5 to 20 bp, 5 to 15 bp, 5-12 bp, 5-10 bp, 5-8 bp, 6 to 40 bp, 6 to 35 bp, 6 to 30 bp, 6 to 25 bp, 6 to 20 bp, 6 to 15 bp, 6 to 12 bp, 6 to 10 bp, 6 to 8 bp, 7 to 40 bp, 7 to 35 bp, 7 to 30 bp, 7 to 25 bp, 7 to 20 bp, 7 to 15 bp, 7 to 12 bp, 7 to 10 bp, 8 to 40 bp, 8 to 35 bp, 8 to 30 bp, 8 to 25 bp, 8 to 20 bp, 8 to 15 bp, 8 to 12 bp, 8 to 10 bp, 9 to 40 bp, 9 to 35 bp, 9 to 30 bp, 9 to 25 bp, 9 to 20 bp, 9 to 15 bp, 9 to 12 bp, 9 to 10 bp, 10 to 40 bp, 10 to 35 bp, 10 to 30 bp, 10 to 25 bp, 10 to 20 bp, 10 to 15 bp, or 10 to 12 bp).

[0194] As an example, a duplex-forming segment of a Cpf1 guide RNA can comprise a nucleotide sequence selected from (5′ to 3′): AAUUUCUACUGUUGUAGAU (SEQ ID NO: 829), AAUUUCUGCUGUUGCAGAU (SEQ ID NO: 830), AAUUUCCACUGUUGUGGAU (SEQ ID NO: 831), AAUUCCUACUGUUGUAGGU (SEQ ID NO: 832), AAUUUCUACUAUUGUAGAU (SEQ ID NO: 833), AAUUUCUACUGCUGUAGAU (SEQ ID NO: 834), AAUUUCUACUUUGUAGAU (SEQ ID NO: 835), and AAUUUCUACUUGUAGAU (SEQ ID NO: 836). The guide sequence can then follow (5′ to 3′) the duplex forming segment.

[0195] A non-limiting example of an activator RNA (e.g. tracrRNA) of a C2c1 guide RNA (dual guide or single guide) is an RNA that includes the nucleotide sequence GAAUUUUUCAACGGGUGUGCCAAUGGCCACUUUCCAGGUGGCAAAGCCCGUUGA GCUUCUCAAAAAG (SEQ ID NO: 837). In some cases, a C2c1 guide RNA (dual guide or single guide) is an RNA that includes the nucleotide sequence In some cases, a C2c1 guide RNA (dual guide or single guide) is an RNA that includes the nucleotide sequence GUCUAGAGGACAGAAUUUUUCAACGGGUGUGCCAAUGGCCACUUUCCAGGUGGC AAAGCCCGUUGAGCUUCUCAAAAAG (SEQ ID NO: 838). In some cases, a C2c1 guide RNA (dual guide or single guide) is an RNA that includes the nucleotide sequence UCUAGAGGACAGAAUUUUUCAACGGGUGUGCCAAUGGCCACUUUCCAGGUGGCA AAGCCCGUUGAGCUUCUCAAAAAG (SEQ ID NO: 839). A non-limiting example of an activator RNA (e.g. tracrRNA) of a C2c1 guide RNA (dual guide or single guide) is an RNA that includes the nucleotide sequence ACUUUCCAGGCAAAGCCCGUUGAGCUUCUCAAAAAG (SEQ ID NO: 840). In some cases, a duplex forming segment of a C2c1 guide RNA (dual guide or single guide) of an activator RNA (e.g. tracrRNA) includes the nucleotide sequence AGCUUCUCA (SEQ ID NO: 841) or the nucleotide sequence GCUUCUCA (SEQ ID NO: 842) (the duplex forming segment from a naturally existing tracrRNA.

[0196] A non-limiting example of a targeter RNA (e.g. crRNA) of a C2c1 guide RNA (dual guide or single guide) is an RNA with the nucleotide sequence CUGAGAAGUGGCACNNNNNNNNNNNNNNNNNNNN (SEQ ID NO: 843), where the Ns represent the guide sequence, which will vary depending on the target sequence, and although 20 Ns are depicted a range of different lengths are acceptable. In some cases, a duplex forming segment of a C2c1 guide RNA (dual guide or single guide) of a targeter RNA (e.g. crRNA) includes the nucleotide sequence CUGAGAAGUGGCAC (SEQ ID NO: 844) or includes the nucleotide sequence CUGAGAAGU (SEQ ID NO: 845) or includes the nucleotide sequence UGAGAAGUGGCAC (SEQ ID NO: 846) or includes the nucleotide sequence UGAGAAGU (SEQ ID NO: 847).

[0197] Examples and guidance related to type V or type VI CRISPR/Cas endonucleases and guide RNAs (as well as information regarding requirements related to protospacer adjacent motif (PAM) sequences present in targeted nucleic acids) can be found in the art, for example, see Zetsche et al., Cell. 2015 Oct. 22; 163(3):759-71; Makarova et al., Nat Rev Microbiol. 2015 November; 13(11):722-36; and Shmakov et al., Mol Cell. 2015 Nov. 5; 60(3):385-97.

### Nucleic Acid Modifications

[0198] In some cases, a modified cargo RNA of a system of the present disclosure comprises one or more modifications, e.g., a base modification, a backbone modification, a sugar modification, etc., to provide the nucleic acid with a new or enhanced feature (e.g., improved stability). A nucleoside is a base-sugar combination. The base portion of the nucleoside is normally a heterocyclic base. The two most common classes of such heterocyclic bases are the purines and the pyrimidines. Nucleotides are nucleosides that further include a phosphate group covalently linked to the sugar portion of the nucleoside. For those nucleosides that include a pentofuranosyl sugar, the phosphate group can be linked to the 2′, the 3′, or the 5′ hydroxyl moiety of the sugar. In forming oligonucleotides, the phosphate groups covalently link adjacent nucleosides to one another to form a linear polymeric compound. In turn, the respective ends of this linear polymeric compound can be further joined to form a circular compound, however, linear compounds are suitable. In addition, linear compounds may have internal nucleotide base complementarity and may therefore fold in a manner as to produce a fully or partially double-stranded compound. Within oligonucleotides, the phosphate groups are commonly referred to as forming the internucleoside backbone of the oligonucleotide. The normal linkage or backbone of RNA and DNA is a 3′ to 5′ phosphodiester linkage.

[0199] Suitable nucleic acid modifications include, but are not limited to: 2′Omethyl modified nucleotides, 2′ Fluoro modified nucleotides, locked nucleic acid (LNA) modified nucleotides, peptide nucleic acid (PNA) modified nucleotides, nucleotides with phosphorothioate linkages, and a 5′ cap (e.g., a 7-methylguanylate cap (m7G)). Additional details and additional modifications are described below.

[0200] In some cases, 2% or more of the nucleotides of a modified cargo RNA (e.g., a guide RNA, etc.) are modified (e.g., 3% or more, 5% or more, 7.5% or more, 10% or more, 15% or more, 20% or more, 25% or more, 30% or more, 35% or more, 40% or more, 45% or more, 50% or more, 55% or more, 60% or more, 65% or more, 75% or more, 80% or more, 85% or more, 90% or more, 95% or more, or 100% of the nucleotides of a subject nucleic acid are modified). In some cases, 2% or more of the nucleotides of a subject guide RNA are modified (e.g., 3% or more, 5% or more, 7.5% or more, 10% or more, 15% or more, 20% or more, 25% or more, 30% or more, 35% or more, 40% or more, 45% or more, 50% or more, 55% or more, 60% or more, 65% or more, 75% or more, 80% or more, 85% or more, 90% or more, 95% or more, or 100% of the nucleotides of a subject guide RNA are modified). In some cases, 2% or more of the nucleotides of a guide RNA are modified (e.g., 3% or more, 5% or more, 7.5% or more, 10% or more, 15% or more, 20% or more, 25% or more, 30% or more, 35% or more, 40% or more, 45% or more, 50% or more, 55% or more, 60% or more, 65% or more, 75% or more, 80% or more, 85% or more, 90% or more, 95% or more, or 100% of the nucleotides of a guide RNA are modified).

[0201] In some cases, the number of nucleotides of a modified cargo RNA (e.g., a guide RNA, etc.) that are modified is in a range of from 3% to 100% (e.g., 3% to 100%, 3% to 95%, 3% to 90%, 3% to 85%, 3% to 80%, 3% to 75%, 3% to 70%, 3% to 65%, 3% to 60%, 3% to 55%, 3% to 50%, 3% to 45%, 3% to 40%, 5% to 100%, 5% to 95%, 5% to 90%, 5% to 85%, 5% to 80%, 5% to 75%, 5% to 70%, 5% to 65%, 5% to 60%, 5% to 55%, 5% to 50%, 5% to 45%, 5% to 40%, 10% to 100%, 10% to 95%, 10% to 90%, 10% to 85%, 10% to 80%, 10% to 75%, 10% to 70%, 10% to 65%, 10% to 60%, 10% to 55%, 10% to 50%, 10% to 45%, or 10% to 40%). In some cases, the number of nucleotides of a modified cargo RNA (e.g., guide RNA) that are modified is in a range of from 3% to 100% (e.g., 3% to 100%, 3% to 95%, 3% to 90%, 3% to 85%, 3% to 80%, 3% to 75%, 3% to 70%, 3% to 65%, 3% to 60%, 3% to 55%, 3% to 50%, 3% to 45%, 3% to 40%, 5% to 100%, 5% to 95%, 5% to 90%, 5% to 85%, 5% to 80%, 5% to 75%, 5% to 70%, 5% to 65%, 5% to 60%, 5% to 55%, 5% to 50%, 5% to 45%, 5% to 40%, 10% to 100%, 10% to 95%, 10% to 90%, 10% to 85%, 10% to 80%, 10% to 75%, 10% to 70%, 10% to 65%, 10% to 60%, 10% to 55%, 10% to 50%, 10% to 45%, or 10% to 40%). In some cases, the number of nucleotides of a modified cargo RNA (e.g., guide RNA) that are modified is in a range of from 3% to 100% (e.g., 3% to 100%, 3% to 95%, 3% to 90%, 3% to 85%, 3% to 80%, 3% to 75%, 3% to 70%, 3% to 65%, 3% to 60%, 3% to 55%, 3% to 50%, 3% to 45%, 3% to 40%, 5% to 100%, 5% to 95%, 5% to 90%, 5% to 85%, 5% to 80%, 5% to 75%, 5% to 70%, 5% to 65%, 5% to 60%, 5% to 55%, 5% to 50%, 5% to 45%, 5% to 40%, 10% to 100%, 10% to 95%, 10% to 90%, 10% to 85%, 10% to 80%, 10% to 75%, 10% to 70%, 10% to 65%, 10% to 60%, 10% to 55%, 10% to 50%, 10% to 45%, or 10% to 40%).

[0202] In some cases, one or more of the nucleotides of a modified cargo RNA (e.g., guide RNA) are modified (e.g., 2 or more, 3 or more, 4 or more, 5 or more, 6 or more, 7 or more, 8 or more, 9 or more, 10 or more, 11 or more, 12 or more, 13 or more, 14 or more, 15 or more, 16 or more, 17 or more, 18 or more, 19 or more, 20 or more, 21 or more, 22 or more, or all of the nucleotides of a modified cargo RNA are modified). In some cases, one or more of the nucleotides of a modified cargo RNA are modified (e.g., 2 or more, 3 or more, 4 or more, 5 or more, 6 or more, 7 or more, 8 or more, 9 or more, 10 or more, 11 or more, 12 or more, 13 or more, 14 or more, 15 or more, 16 or more, 17 or more, 18 or more, 19 or more, 20 or more, 21 or more, 22 or more, or all of the nucleotides of a modified cargo RNA are modified). In some cases, one or more of the nucleotides of a guide RNA are modified (e.g., 2 or more, 3 or more, 4 or more, 5 or more, 6 or more, 7 or more, 8 or more, 9 or more, 10 or more, 11 or more, 12 or more, 13 or more, 14 or more, 15 or more, 16 or more, 17 or more, 18 or more, 19 or more, 20 or more, 21 or more, 22 or more, or all of the nucleotides of a guide RNA are modified).

[0203] In some cases, 99% or less of the nucleotides of a modified cargo RNA (e.g., a guide RNA, etc.) are modified (e.g., 99% or less, 95% or less, 90% or less, 85% or less, 80% or less, 75% or less, 70% or less, 65% or less, 60% or less, 55% or less, 50% or less, or 45% or less of the nucleotides of a modified cargo RNA are modified). In some cases, 99% or less of the nucleotides of a modified cargo RNA are modified (e.g., e.g., 99% or less, 95% or less, 90% or less, 85% or less, 80% or less, 75% or less, 70% or less, 65% or less, 60% or less, 55% or less, 50% or less, or 45% or less of the nucleotides of a modified cargo RNA are modified). In some cases, 99% or less of the nucleotides of a guide RNA are modified (e.g., 99% or less, 95% or less, 90% or less, 85% or less, 80% or less, 75% or less, 70% or less, 65% or less, 60% or less, 55% or less, 50% or less, or 45% or less of the nucleotides of a guide RNA are modified).

[0204] In some cases, the number of nucleotides of a modified cargo RNA (e.g., a guide RNA, etc.) that are modified is in a range of from 1 to 30 (e.g., 1 to 25, 1 to 20, 1 to 18, 1 to 15, 1 to 10, 2 to 25, 2 to 20, 2 to 18, 2 to 15, 2 to 10, 3 to 25, 3 to 20, 3 to 18, 3 to 15, or 3 to 10). In some cases, the number of nucleotides of a modified cargo RNA that are modified is in a range of from 1 to 30 (e.g., 1 to 25, 1 to 20, 1 to 18, 1 to 15, 1 to 10, 2 to 25, 2 to 20, 2 to 18, 2 to 15, 2 to 10, 3 to 25, 3 to 20, 3 to 18, 3 to 15, or 3 to 10). In some cases, the number of nucleotides of a modified cargo RNA that are modified is in a range of from 1 to 30 (e.g., 1 to 25, 1 to 20, 1 to 18, 1 to 15, 1 to 10, 2 to 25, 2 to 20, 2 to 18, 2 to 15, 2 to 10, 3 to 25, 3 to 20, 3 to 18, 3 to 15, or 3 to 10).

[0205] In some cases, 20 or fewer of the nucleotides of a modified cargo RNA (e.g., a guide RNA, etc.) are modified (e.g., 19 or fewer, 18 or fewer, 17 or fewer, 16 or fewer, 15 or fewer, 14 or fewer, 13 or fewer, 12 or fewer, 11 or fewer, 10 or fewer, 9 or fewer, 8 or fewer, 7 or fewer, 6 or fewer, 5 or fewer, 4 or fewer, 3 or fewer, 2 or fewer, or one, of the nucleotides of a modified cargo RNA are modified). In some cases, 20 or fewer of the nucleotides of a modified cargo RNA are modified (e.g., 19 or fewer, 18 or fewer, 17 or fewer, 16 or fewer, 15 or fewer, 14 or fewer, 13 or fewer, 12 or fewer, 11 or fewer, 10 or fewer, 9 or fewer, 8 or fewer, 7 or fewer, 6 or fewer, 5 or fewer, 4 or fewer, 3 or fewer, 2 or fewer, or one, of the nucleotides of a modified cargo RNA are modified). In some cases, 20 or fewer of the nucleotides of a modified cargo RNA are modified (e.g., 19 or fewer, 18 or fewer, 17 or fewer, 16 or fewer, 15 or fewer, 14 or fewer, 13 or fewer, 12 or fewer, 11 or fewer, 10 or fewer, 9 or fewer, 8 or fewer, 7 or fewer, 6 or fewer, 5 or fewer, 4 or fewer, 3 or fewer, 2 or fewer, or one, of the nucleotides of a guide RNA are modified).

[0206] A 2′-O-Methyl modified nucleotide (also referred to as 2′-O-Methyl RNA) is a naturally occurring modification of RNA found in tRNA and other small RNAs that arises as a post-transcriptional modification. Oligonucleotides can be directly synthesized that contain 2′-O-Methyl RNA. This modification increases Tm of RNA:RNA duplexes but results in only small changes in RNA:DNA stability. It is stable with respect to attack by single-stranded ribonucleases and is typically 5 to 10-fold less susceptible to DNases than DNA. It is commonly used in antisense oligos as a means to increase stability and binding affinity to the target message.

[0207] 2′ Fluoro modified nucleotides (e.g., 2′ Fluoro bases) have a fluorine modified ribose which increases binding affinity (Tm) and also confers some relative nuclease resistance when compared to native RNA. These modifications are commonly employed in ribozymes and siRNAs to improve stability in serum or other biological fluids.

[0208] LNA bases have a modification to the ribose backbone that locks the base in the C3′-endo position, which favors RNA A-type helix duplex geometry. This modification significantly increases Tm and is also very nuclease resistant. Multiple LNA insertions can be placed in an oligo at any position except the 3′-end. Applications have been described ranging from antisense oligos to hybridization probes to SNP detection and allele specific PCR. Due to the large increase in Tm conferred by LNAs, they also can cause an increase in primer dimer formation as well as self-hairpin formation. In some cases, the number of LNAs incorporated into a single oligo is 10 bases or less.

[0209] The phosphorothioate (PS) bond (i.e., a phosphorothioate linkage) substitutes a sulfur atom for a non-bridging oxygen in the phosphate backbone of a nucleic acid (e.g., an oligo). This modification renders the internucleotide linkage resistant to nuclease degradation. Phosphorothioate bonds can be introduced between the last 3-5 nucleotides at the 5′- or 3′-end of the oligo to inhibit exonuclease degradation. Including phosphorothioate bonds within the oligo (e.g., throughout the entire oligo) can help reduce attack by endonucleases as well.

[0210] In some cases, a modified cargo RNA (e.g., a guide RNA, etc.) has one or more nucleotides that are 2′-O-Methyl modified nucleotides. In some case, a modified cargo RNA acid (e.g., a guide RNA, etc.) has one or more 2′ Fluoro modified nucleotides. In some cases, a modified cargo RNA (e.g., a guide RNA, etc.) has one or more LNA bases. In some cases, a modified cargo RNA (e.g., a guide RNA, etc.) has one or more nucleotides that are linked by a phosphorothioate bond (i.e., the modified cargo RNA has one or more phosphorothioate linkages). In some cases, a modified cargo RNA (e.g., a guide RNA, etc.) has a 5′ cap (e.g., a 7-methylguanylate cap (m7G)).

[0211] In some cases, a modified cargo RNA has a combination of modified nucleotides. For example, a nucleic acid can have a 5′ cap (e.g., a 7-methylguanylate cap (m7G)) in addition to having one or more nucleotides with other modifications (e.g., a 2′-O-Methyl nucleotide and/or a 2′ Fluoro modified nucleotide and/or a LNA base and/or a phosphorothioate linkage).

[0212] Modified Backbones and Modified Internucleoside Linkages

[0213] In some cases, a modified cargo RNA comprises a modified backbone and/or modified internucleoside linkages. Examples of suitable nucleic acids containing modifications include nucleic acids containing modified backbones or non-natural internucleoside linkages. Nucleic acids having modified backbones include those that retain a phosphorus atom in the backbone and those that do not have a phosphorus atom in the backbone.

[0214] Suitable modified oligonucleotide backbones containing a phosphorus atom therein include, for example, phosphorothioates, chiral phosphorothioates, phosphorodithioates, phosphotriesters, aminoalkylphosphotriesters, methyl and other alkyl phosphonates including 3′-alkylene phosphonates, 5′-alkylene phosphonates and chiral phosphonates, phosphinates, phosphoramidates including 3′-amino phosphoramidate and aminoalkylphosphoramidates, phosphorodiamidates, thionophosphoramidates, thionoalkylphosphonates, thionoalkylphosphotriesters, selenophosphates and boranophosphates having normal 3′-5′ linkages, 2′-5′ linked analogs of these, and those having inverted polarity wherein one or more internucleotide linkages is a 3′ to 3′, 5′ to 5′ or 2′ to 2′ linkage. Suitable oligonucleotides having inverted polarity comprise a single 3′ to 3′ linkage at the 3′-most internucleotide linkage i.e. a single inverted nucleoside residue which may be a basic (the nucleobase is missing or has a hydroxyl group in place thereof). Various salts (such as, for example, potassium or sodium), mixed salts and free acid forms are also included.

[0215] In some cases, a modified cargo RNA comprises one or more phosphorothioate and/or heteroatom internucleoside linkages, in particular —CH₂—NH—O—CH₂—, —CH₂—N(CH₃)—O—CH₂-(known as a methylene (methylimino) or MMI backbone), —CH₂—O—N(CH₃)—CH₂—, —CH₂—N(CH₃)—N(CH₃)—CH₂— and —O—N(CH₃)—CH₂—CH₂— (wherein the native phosphodiester internucleotide linkage is represented as —O—P(═O)(OH)—O—CH₂—). MMI type internucleoside linkages are disclosed in the above referenced U.S. Pat. No. 5,489,677. Suitable amide internucleoside linkages are disclosed in t U.S. Pat. No. 5,602,240.

[0216] Also suitable are morpholino backbone structures as described in, e.g., U.S. Pat. No. 5,034,506. For example, in some cases, a modified cargo RNA comprises a 6-membered morpholino ring in place of a ribose ring. In some of these cases, a phosphorodiamidate or other non-phosphodiester internucleoside linkage replaces a phosphodiester linkage.

[0217] Suitable modified polynucleotide backbones that do not include a phosphorus atom therein have backbones that are formed by short chain alkyl or cycloalkyl internucleoside linkages, mixed heteroatom and alkyl or cycloalkyl internucleoside linkages, or one or more short chain heteroatomic or heterocyclic internucleoside linkages. These include those having morpholino linkages (formed in part from the sugar portion of a nucleoside); siloxane backbones; sulfide, sulfoxide and sulfone backbones; formacetyl and thioformacetyl backbones; methylene formacetyl and thioformacetyl backbones; riboacetyl backbones; alkene containing backbones; sulfamate backbones; methyleneimino and methylenehydrazino backbones; sulfonate and sulfonamide backbones; amide backbones; and others having mixed N, O, S and CH₂ component parts.

[0218] Mimetics

[0219] A modified cargo RNA can be a nucleic acid mimetic. The term “mimetic” as it is applied to polynucleotides is intended to include polynucleotides wherein only the furanose ring or both the furanose ring and the internucleotide linkage are replaced with non-furanose groups, replacement of only the furanose ring is also referred to in the art as being a sugar surrogate. The heterocyclic base moiety or a modified heterocyclic base moiety is maintained for hybridization with an appropriate target nucleic acid. One such nucleic acid, a polynucleotide mimetic that has been shown to have excellent hybridization properties, is referred to as a peptide nucleic acid (PNA). In PNA, the sugar-backbone of a polynucleotide is replaced with an amide containing backbone, in particular an aminoethylglycine backbone. The nucleotides are retained and are bound directly or indirectly to aza nitrogen atoms of the amide portion of the backbone.

[0220] One polynucleotide mimetic that has been reported to have excellent hybridization properties is a peptide nucleic acid (PNA). The backbone in PNA compounds is two or more linked aminoethylglycine units which gives PNA an amide containing backbone. The heterocyclic base moieties are bound directly or indirectly to aza nitrogen atoms of the amide portion of the backbone. Representative U.S. patents that describe the preparation of PNA compounds include, but are not limited to: U.S. Pat. Nos. 5,539,082; 5,714,331; and 5,719,262.

[0221] Another class of polynucleotide mimetic that has been studied is based on linked morpholino units (morpholino nucleic acid) having heterocyclic bases attached to the morpholino ring. A number of linking groups have been reported that link the morpholino monomeric units in a morpholino nucleic acid. One class of linking groups has been selected to give a non-ionic oligomeric compound. The non-ionic morpholino-based oligomeric compounds are less likely to have undesired interactions with cellular proteins. Morpholino-based polynucleotides are non-ionic mimics of oligonucleotides which are less likely to form undesired interactions with cellular proteins (Dwaine A. Braasch and David R. Corey, Biochemistry, 2002, 41(14), 4503-4510). Morpholino-based polynucleotides are disclosed in U.S. Pat. No. 5,034,506. A variety of compounds within the morpholino class of polynucleotides have been prepared, having a variety of different linking groups joining the monomeric subunits.

[0222] A further class of polynucleotide mimetic is referred to as cyclohexenyl nucleic acids (CeNA). The furanose ring normally present in a DNA/RNA molecule is replaced with a cyclohexenyl ring. CeNA DMT protected phosphoramidite monomers have been prepared and used for oligomeric compound synthesis following classical phosphoramidite chemistry. Fully modified CeNA oligomeric compounds and oligonucleotides having specific positions modified with CeNA have been prepared and studied (see Wang et al., J. Am. Chem. Soc., 2000, 122, 8595-8602). In general the incorporation of CeNA monomers into a DNA chain increases its stability of a DNA/RNA hybrid. CeNA oligoadenylates formed complexes with RNA and DNA complements with similar stability to the native complexes. The study of incorporating CeNA structures into natural nucleic acid structures was shown by NMR and circular dichroism to proceed with easy conformational adaptation.

[0223] A further modification includes Locked Nucleic Acids (LNAs) in which the 2′-hydroxyl group is linked to the 4′ carbon atom of the sugar ring thereby forming a 2′-C,4′-C-oxymethylene linkage thereby forming a bicyclic sugar moiety. The linkage can be a methylene (—CH₂—), group bridging the 2′ oxygen atom and the 4′ carbon atom wherein n is 1 or 2 (Singh et al., Chem. Commun., 1998, 4, 455-456). LNA and LNA analogs display very high duplex thermal stabilities with complementary DNA and RNA (Tm=+3 to +10° C.), stability towards 3′-exonucleolytic degradation and good solubility properties. Potent and nontoxic antisense oligonucleotides containing LNAs have been described (e.g., Wahlestedt et al., Proc. Natl. Acad. Sci. U.S.A., 2000, 97, 5633-5638).

[0224] The synthesis and preparation of the LNA monomers adenine, cytosine, guanine, 5-methyl-cytosine, thymine and uracil, along with their oligomerization, and nucleic acid recognition properties have been described (e.g., Koshkin et al., Tetrahedron, 1998, 54, 3607-3630). LNAs and preparation thereof are also described in WO 98/39352 and WO 99/14226, as well as U.S. applications 20120165514, 20100216983, 20090041809, 20060117410, 20040014959, 20020094555, and 20020086998.

[0225] Modified Sugar Moieties

[0226] A modified cargo RNA can also include one or more substituted sugar moieties. Suitable polynucleotides comprise a sugar substituent group selected from: OH; F; O-, S-, or N-alkyl; O-, S-, or N-alkenyl; O-, S- or N-alkynyl; or O-alkyl-O-alkyl, wherein the alkyl, alkenyl and alkynyl may be substituted or unsubstituted C₁ to C₁₀ alkyl or C₂ to C₁₀ alkenyl and alkynyl. Particularly suitable are O((CH₂)ₙO)ₘCH₃, O(CH₂)ₙOCH₃, O(CH₂)ₙNH₂, O(CH₂)ₙCH₃, O(CH₂)ₙONH₂, and O(CH₂)ₙON((CH₂)ₙCH₃)₂, where n and m are from 1 to about 10. Other suitable polynucleotides comprise a sugar substituent group selected from: C₁ to C₁₀ lower alkyl, substituted lower alkyl, alkenyl, alkynyl, alkaryl, aralkyl, O-alkaryl or O-aralkyl, SH, SCH₃, OCN, Cl, Br, CN, CF₃, OCF₃, SOCH₃, SO₂CH₃, ONO₂, NO₂, N₃, NH₂, heterocycloalkyl, heterocycloalkaryl, aminoalkylamino, polyalkylamino, substituted silyl, an RNA cleaving group, a reporter group, an intercalator, a group for improving the pharmacokinetic properties of an oligonucleotide, or a group for improving the pharmacodynamic properties of an oligonucleotide, and other substituents having similar properties. A suitable modification includes 2′-methoxyethoxy (2′-O—CH₂ CH₂OCH₃, also known as 2′-O-(2-methoxyethyl) or 2′-MOE) (Martin et al., Helv. Chim. Acta, 1995, 78, 486-504) i.e., an alkoxyalkoxy group. A further suitable modification includes 2′-dimethylaminooxyethoxy, i.e., a O(CH₂)₂ON(CH₃)₂ group, also known as 2′-DMAOE, as described in examples herein below, and 2′-dimethylaminoethoxyethoxy (also known in the art as 2′-O-dimethyl-amino-ethoxy-ethyl or 2′-DMAEOE), i.e., 2′-O—CH₂—O—CH₂-N(CH₃)2.

[0227] Other suitable sugar substituent groups include methoxy (—O—CH₃), aminopropoxy (—O CH₂ CH₂ CH₂NH₂), allyl (—CH₂—CH═CH₂), —O-allyl (—O—CH₂—CH═CH₂) and fluoro (F). 2′-sugar substituent groups may be in the arabino (up) position or ribo (down) position. A suitable 2′-arabino modification is 2′-F. Similar modifications may also be made at other positions on the oligomeric compound, particularly the 3′ position of the sugar on the 3′ terminal nucleoside or in 2′-5′ linked oligonucleotides and the 5′ position of 5′ terminal nucleotide. Oligomeric compounds may also have sugar mimetics such as cyclobutyl moieties in place of the pentofuranosyl sugar.

[0228] Base Modifications and Substitutions

[0229] A modified cargo RNA may also include nucleobase (often referred to in the art simply as “base”) modifications or substitutions. As used herein, “unmodified” or “natural” nucleobases include the purine bases adenine (A) and guanine (G), and the pyrimidine bases thymine (T), cytosine (C) and uracil (U). Modified nucleobases include other synthetic and natural nucleobases such as 5-methylcytosine (5-me-C), 5-hydroxymethyl cytosine, xanthine, hypoxanthine, 2-aminoadenine, 6-methyl and other alkyl derivatives of adenine and guanine, 2-propyl and other alkyl derivatives of adenine and guanine, 2-thiouracil, 2-thiothymine and 2-thiocytosine, 5-halouracil and cytosine, 5-propynyl (—C═C—CH₃) uracil and cytosine and other alkynyl derivatives of pyrimidine bases, 6-azo uracil, cytosine and thymine, 5-uracil (pseudouracil), 4-thiouracil, 8-halo, 8-amino, 8-thiol, 8-thioalkyl, 8-hydroxyl and other 8-substituted adenines and guanines, 5-halo particularly 5-bromo, 5-trifluoromethyl and other 5-substituted uracils and cytosines, 7-methylguanine and 7-methyladenine, 2-F-adenine, 2-amino-adenine, 8-azaguanine and 8-azaadenine, 7-deazaguanine and 7-deazaadenine and 3-deazaguanine and 3-deazaadenine. Further modified nucleobases include tricyclic pyrimidines such as phenoxazine cytidine(1H-pyrimido(5,4-b)(1,4)benzoxazin-2(3H)-one), phenothiazine cytidine (1H-pyrimido(5,4-b)(1,4)benzothiazin-2(3H)-one), G-clamps such as a substituted phenoxazine cytidine (e.g. 9-(2-aminoethoxy)-H-pyrimido(5,4-(b) (1,4)benzoxazin-2(3H)-one), carbazole cytidine (2H-pyrimido(4,5-b)indol-2-one), pyridoindole cytidine (H-pyrido(3′,2′:4,5)pyrrolo(2,3-d)pyrimidin-2-one).

[0230] Heterocyclic base moieties may also include those in which the purine or pyrimidine base is replaced with other heterocycles, for example 7-deaza-adenine, 7-deazaguanosine, 2-aminopyridine and 2-pyridone. Further nucleobases include those disclosed in U.S. Pat. No. 3,687,808, those disclosed in The Concise Encyclopedia Of Polymer Science And Engineering, pages 858-859, Kroschwitz, J. I., ed. John Wiley & Sons, 1990, those disclosed by Englisch et al., Angewandte Chemie, International Edition, 1991, 30, 613, and those disclosed by Sanghvi, Y. S., Chapter 15, Antisense Research and Applications, pages 289-302, Crooke, S. T. and Lebleu, B., ed., CRC Press, 1993. Certain of these nucleobases are useful for increasing the binding affinity of an oligomeric compound. These include 5-substituted pyrimidines, 6-azapyrimidines and N-2, N-6 and O-6 substituted purines, including 2-aminopropyladenine, 5-propynyluracil and 5-propynylcytosine. 5-methylcytosine substitutions have been shown to increase nucleic acid duplex stability by 0.6-1.2° C. (Sanghvi et al., eds., Antisense Research and Applications, CRC Press, Boca Raton, 1993, pp. 276-278) and are suitable base substitutions, e.g., when combined with 2′-O-methoxyethyl sugar modifications.

### RNA-Guided CRISPR/Cas Effector Proteins

[0231] As noted above, a system of the present disclosure comprises: a) a modified RBP comprising: i) an RBP; and ii) one or more endosomolytic peptides covalently linked, directly or via a linker, to the RBP; and b) a modified cargo RNA complexed to the RBP, wherein the modified cargo RNA comprises a cargo RNA modified to include one or more RBP binding sites that are bound by the RBP present in the modified RBP. As noted above, in some cases, the cargo RNA is a guide RNA comprising: i) a targeting segment comprising a nucleotide sequence that hybridizes to a nucleotide sequence in a target nucleic acid; and ii) an activation segment comprising a nucleotide sequence that binds to and activates an RNA-guided effector polypeptide. As noted above, in some cases, the system comprises an RNA-guided effector polypeptide. The RNA-guided effector polypeptide can form a complex with the guide RNA portion of the modified cargo RNA. In some cases, the RNA-guided effector polypeptide includes a targeting moiety, e.g., a moiety that provides for selective binding to a particular cell type. In some cases, the targeting moiety is a chemical compound, a peptide, or an antibody.

[0232] Suitable RNA-guided CRISPR/Cas effector polypeptides include, but are not limited to, a class 2 CRISPR/Cas effector polypeptide (e.g., a type II CRISPR/Cas effector polypeptide, a Cas9 protein, a type V or type VI CRISPR/Cas effector polypeptide, a Cpf1 protein, a C2c1 protein, a C2c3 protein, a C2c2 protein, a Cas12 enzyme, or a Cas13 enzyme).

[0233] In certain cases, the RNA-guided CRISPR/Cas effector polypeptide is a CRISPR/Cas endonuclease (e.g., class 2 CRISPR/Cas endonucleases such as a type II, type V, or type VI CRISPR/Cas endonucleases). In some cases, a suitable RNA-guided CRISPR/Cas effector polypeptide is a class 2 CRISPR/Cas endonuclease. In some cases, a suitable RNA-guided CRISPR/Cas effector polypeptide is a class 2 type II CRISPR/Cas endonuclease (e.g., a Cas9 protein). In some cases, a suitable RNA-guided CRISPR/Cas effector polypeptide is a class 2 type V CRISPR/Cas endonuclease (e.g., a Cpf1 protein, a C2c1 protein, or a C2c3 protein). In some cases, a suitable RNA-guided CRISPR/Cas effector polypeptide is a class 2 type VI CRISPR/Cas endonuclease (e.g., a C2c2 protein; also referred to as a “Cas13a” protein). Also suitable for use is a CasX protein. Also suitable for use is a CasY protein.

[0234] In some cases, the RNA-guided CRISPR/Cas effector polypeptide is a Type II CRISPR/Cas endonuclease. In some cases, the RNA-guided CRISPR/Cas effector polypeptide is a Cas9 polypeptide. The Cas9 protein is guided to a target site (e.g., stabilized at a target site) within a target nucleic acid sequence (e.g., a chromosomal sequence or an extrachromosomal sequence, e.g., an episomal sequence, a minicircle sequence, a mitochondrial sequence, a chloroplast sequence, etc.) by virtue of its association with the protein-binding segment of the Cas9 guide RNA. In some cases, a Cas9 polypeptide comprises an amino acid sequence having at least 50%, at least 60%, at least 70%, at least 80%, at least 90%, at least 95%, at least 98%, at least 99%, or more than 99%, amino acid sequence identity to the Streptococcus pyogenes Cas9 depicted in FIG. 5A. In some cases, a Cas9 polypeptide comprises the amino acid sequence depicted in one of FIG. 5A-5F.

[0235] In some cases, the Cas9 polypeptide used in a system or method of the present disclosure is a Staphylococcus aureus Cas9 (saCas9) polypeptide. In some cases, the saCas9 polypeptide comprises an amino acid sequence having at least 85%, at least 90%, at least 95%, at least 98%, at least 99%, or 100%, amino acid sequence identity to the saCas9 amino acid sequence depicted in FIG. 6.

[0236] In some cases, the Cas9 polypeptide used in a system or method of the present disclosure is a Campylobacter jejuni Cas9 (CjCas9) polypeptide. CjCas9 recognizes the 5′-NNNVRYM-3′ as the protospacer-adjacent motif (PAM). In some cases, a Cas9 polypeptide suitable for use in a system or method of the present disclosure comprises an amino acid sequence having at least 50%, at least 60%, at least 70%, at least 80%, at least 90%, at least 95%, at least 98%, at least 99%, or more than 99%, amino acid sequence identity to the CjCas9 amino acid sequence set forth in SEQ ID NO:55.

[0237] In some cases, a suitable Cas9 polypeptide is a high-fidelity (HF) Cas9 polypeptide. Kleinstiver et al. (2016) Nature 529:490. For example, amino acids N₄₉₇, R661, Q695, and Q926 of the amino acid sequence depicted in FIG. 5A are substituted, e.g., with alanine. For example, an HF Cas9 polypeptide can comprise an amino acid sequence having at least 90%, at least 95%, at least 98%, at least 99%, or 100%, amino acid sequence identity to the amino acid sequence depicted in FIG. 5A, where amino acids N₄₉₇, R661, Q695, and Q926 are substituted, e.g., with alanine.

[0238] In some cases, a suitable Cas9 polypeptide exhibits altered PAM specificity. See, e.g., Kleinstiver et al. (2015) Nature 523:481.

[0239] In some cases, the RNA-guided CRISPR/Cas effector polypeptide is a type V CRISPR/Cas endonuclease. In some cases, a type V CRISPR/Cas endonuclease is a Cpf1 protein. In some cases, a Cpf1 protein comprises an amino acid sequence having at least 30%, at least 35%, at least 40%, at least 45%, at least 50%, at least 55%, at least 60%, at least 65%, at least 70%, at least 75%, at least 80%, at least 85%, at least 90%, at least 95%, at least 90%, or 100%, amino acid sequence identity to the Cpf1 amino acid sequence depicted in FIG. 7A, FIG. 7B, or FIG. 7C.

[0240] In some cases, the RNA-guided CRISPR/Cas effector polypeptide is a CasX or a CasY polypeptide. CasX and CasY polypeptides are described in Burstein et al. (2017) Nature 542:237.

[0241] In some cases, an RNA-guided CRISPR/Cas effector polypeptide is a fusion protein that comprises the RNA-guided CRISPR/Cas effector polypeptide fused to a heterologous polypeptide (also referred to as a “fusion partner”). In some cases, the fusion partner provides for subcellular localization, i.e., the fusion partner is a subcellular localization sequence (e.g., one or more nuclear localization signals (NLSs) for targeting to the nucleus, two or more NLSs, three or more NLSs, etc.).

[0242] In some cases, a suitable Cas9 polypeptide is a high-fidelity (HF) Cas9 polypeptide. Kleinstiver et al. (2016) Nature 529:490. For example, amino acids N₄₉₇, R661, Q695, and Q926 of the amino acid sequence depicted in FIG. 5A are substituted, e.g., with alanine. For example, an HF Cas9 polypeptide can comprise an amino acid sequence having at least 90%, at least 95%, at least 98%, at least 99%, or 100%, amino acid sequence identity to the amino acid sequence depicted in FIG. 5A, where amino acids N₄₉₇, R661, Q695, and Q926 are substituted, e.g., with alanine.

[0243] In some cases, a suitable Cas9 polypeptide exhibits altered PAM specificity. See, e.g., Kleinstiver et al. (2015) Nature 523:481.

[0244] In some cases, the genome-editing endonuclease is a type V CRISPR/Cas endonuclease. In some cases, a type V CRISPR/Cas endonuclease is a Cpf1 protein. In some cases, a Cpf1 protein comprises an amino acid sequence having at least 30%, at least 35%, at least 40%, at least 45%, at least 50%, at least 55%, at least 60%, at least 65%, at least 70%, at least 75%, at least 80%, at least 85%, at least 90%, at least 95%, at least 90%, or 100%, amino acid sequence identity to the Cpf1 amino acid sequence depicted in FIG. 7A. In some cases, a Cpf1 protein comprises an amino acid sequence having at least 30%, at least 35%, at least 40%, at least 45%, at least 50%, at least 55%, at least 60%, at least 65%, at least 70%, at least 75%, at least 80%, at least 85%, at least 90%, at least 95%, at least 90%, or 100%, amino acid sequence identity to the Cpf1 amino acid sequence depicted in FIG. 7B. In some cases, a Cpf1 protein comprises an amino acid sequence having at least 30%, at least 35%, at least 40%, at least 45%, at least 50%, at least 55%, at least 60%, at least 65%, at least 70%, at least 75%, at least 80%, at least 85%, at least 90%, at least 95%, at least 90%, or 100%, amino acid sequence identity to the Cpf1 amino acid sequence depicted in FIG. 7C.

[0245] A nucleic acid that binds to a class 2 CRISPR/Cas endonuclease (e.g., a Cas9 protein; a type V or type VI CRISPR/Cas protein; a Cpf1 protein; etc.) and targets the complex to a specific location within a target nucleic acid is referred to herein as a “guide RNA” or “CRISPR/Cas guide nucleic acid” or “CRISPR/Cas guide RNA.” A guide RNA provides target specificity to the complex (the RNP complex) by including a targeting segment, which includes a guide sequence (also referred to herein as a targeting sequence), which is a nucleotide sequence that is complementary to a nucleotide sequence present in a target nucleic acid.

[0246] In some cases, a guide RNA includes two separate nucleic acid molecules: an “activator” and a “targeter” and is referred to herein as a “dual guide RNA”, a “double-molecule guide RNA”, a “two-molecule guide RNA”, or a “dgRNA.” In some cases, the guide RNA is one molecule (e.g., for some class 2 CRISPR/Cas proteins, the corresponding guide RNA is a single molecule; and in some cases, an activator and targeter are covalently linked to one another, e.g., via intervening nucleotides), and the guide RNA is referred to as a “single guide RNA”, a “single-molecule guide RNA,” a “one-molecule guide RNA”, or simply “sgRNA.” In some cases, the guide RNA is a multi-component guide RNA. In some cases, the multi-component guide RNA comprises 2 or more, or 3 or more polynucleotides (e.g. split-nexus polynucleotides). Non-limiting examples of three split-nexus polynucleotides can be found in U.S. Patent Application Publication No. 20170335347, which is hereby incorporated by reference in its entirety.

[0247] In some cases, a system of the present disclosure comprises an RNA-guided CRISPR/Cas effector polypeptide, where the RNA-guided CRISPR/Cas effector polypeptide may be complexed with the guide RNA portion of the modified cargo RNA. In some cases, e.g., where a target nucleic acid comprises a deleterious mutation in a defective allele (e.g., a deleterious mutation in a retinal cell target nucleic acid), the RNA-guided endonuclease/guide RNA complex, together with a donor nucleic acid comprising a nucleotide sequence that corrects the deleterious mutation (e.g., a donor nucleic acid comprising a nucleotide sequence that encodes a functional copy of the protein encoded by the defective allele), can be used to correct the deleterious mutation, e.g., via homology-directed repair (HDR).

[0248] In some cases, a system of the present disclosure comprises: i) an RNA-guided CRISPR/Cas effector polypeptide; and ii) one modified guide RNA (a guide RNA modified to include binding sites for the RBP). In some cases, the guide RNA is a single-molecule (or “single guide”) guide RNA (an “sgRNA”). In some cases, the guide RNA is a dual-molecule (or “dual-guide”) guide RNA (“dgRNA”). In some cases, the guide RNA is a multi-component guide RNA. In some cases, the multi-component guide RNA is one or more split-nexus polynucleotides.

[0249] In some cases, a system of the present disclosure comprises: i) RNA-guided CRISPR/Cas effector polypeptide; and ii) 2 separate sgRNAs, where the 2 separate sgRNAs provide for deletion of a target nucleic acid via non-homologous end joining (NHEJ). In some cases, the guide RNAs are sgRNAs. In some cases, the guide RNAs are dgRNAs.

### Class 2 CRISPR/Cas Endonucleases

[0250] RNA-mediated adaptive immune systems in bacteria and archaea rely on Clustered Regularly Interspaced Short Palindromic Repeat (CRISPR) genomic loci and CRISPR-associated (Cas) proteins that function together to provide protection from invading viruses and plasmids. In class 2 CRISPR systems, the functions of the effector complex (e.g., the cleavage of target DNA) are carried out by a single endonuclease (e.g., see Zetsche et al., Cell. 2015 Oct. 22; 163(3):759-71; Makarova et al., Nat Rev Microbiol. 2015 November; 13(11):722-36; Shmakov et al., Mol Cell. 2015 Nov. 5; 60(3):385-97); and Shmakov et al. (2017) Nature Reviews Microbiology 15:169. As such, the term “class 2 CRISPR/Cas protein” is used herein to encompass the endonuclease (the target nucleic acid cleaving protein) from class 2 CRISPR systems. Thus, the term “class 2 CRISPR/Cas endonuclease” as used herein encompasses type II CRISPR/Cas proteins (e.g., Cas9); type V-A CRISPR/Cas proteins (e.g., Cpf1 (also referred to a “Cas12a”)); type V-B CRISPR/Cas proteins (e.g., C2c1 (also referred to as “Cas12b”)); type V-C CRISPR/Cas proteins (e.g., C2c3 (also referred to as “Cas12c”)); type V-U1 CRISPR/Cas proteins (e.g., C2c4); type V-U2 CRISPR/Cas proteins (e.g., C2c8); type V-U5 CRISPR/Cas proteins (e.g., C2c5); type V-U4 CRISPR/Cas proteins (e.g., C2c9); type V-U3 CRISPR/Cas proteins (e.g., C2c10); type VI-A CRISPR/Cas proteins (e.g., C2c2 (also known as “Cas13a”)); type VI-B CRISPR/Cas proteins (e.g., Cas13b (also known as C2c4)); and type VI-C CRISPR/Cas proteins (e.g., Cas13c (also known as C2c7)). To date, class 2 CRISPR/Cas proteins encompass type II, type V, and type VI CRISPR/Cas proteins, but the term is also meant to encompass any class 2 CRISPR/Cas protein suitable for binding to a corresponding guide RNA and forming an RNP complex.

### Type II CRISPR/Cas Endonucleases (e.g., Cas9)

[0251] In natural Type II CRISPR/Cas systems, Cas9 functions as an RNA-guided endonuclease that uses a dual-guide RNA having a crRNA and trans-activating crRNA (tracrRNA) for target recognition and cleavage by a mechanism involving two nuclease active sites in Cas9 that together generate double-stranded DNA breaks (DSBs), or can individually generate single-stranded DNA breaks (SSBs). The Type II CRISPR endonuclease Cas9 and engineered dual- (dgRNA) or single guide RNA (sgRNA) form a ribonucleoprotein (RNP) complex that can be targeted to a desired DNA sequence. Guided by a dual-RNA complex or a chimeric single-guide RNA, Cas9 generates site-specific DSBs or SSBs within double-stranded DNA (dsDNA) target nucleic acids, which are repaired either by non-homologous end joining (NHEJ) or homology-directed recombination (HDR).

[0252] A type II CRISPR/Cas endonuclease is a type of class 2 CRISPR/Cas endonuclease. In some cases, the type II CRISPR/Cas endonuclease is a Cas9 protein. A Cas9 protein forms a complex with a Cas9 guide RNA. The guide RNA provides target specificity to a Cas9-guide RNA complex by having a nucleotide sequence (a guide sequence) that is complementary to a sequence (the target site) of a target nucleic acid (as described elsewhere herein). The Cas9 protein of the complex provides the site-specific activity. In other words, the Cas9 protein is guided to a target site (e.g., stabilized at a target site) within a target nucleic acid sequence (e.g. a chromosomal sequence or an extrachromosomal sequence, e.g., an episomal sequence, a minicircle sequence, a mitochondrial sequence, a chloroplast sequence, etc.) by virtue of its association with the protein-binding segment of the Cas9 guide RNA.

[0253] A Cas9 protein can bind and/or modify (e.g., cleave, nick, methylate, demethylate, etc.) a target nucleic acid and/or a polypeptide associated with target nucleic acid (e.g., methylation or acetylation of a histone tail)(e.g., when the Cas9 protein includes a fusion partner with an activity). In some cases, the Cas9 protein is a naturally-occurring protein (e.g., naturally occurs in bacterial and/or archaeal cells). In other cases, the Cas9 protein is not a naturally-occurring polypeptide (e.g., the Cas9 protein is a variant Cas9 protein, a chimeric protein, and the like).

[0254] Examples of suitable Cas9 proteins include, but are not limited to, those set forth in SEQ ID NOs: 5-816. Naturally occurring Cas9 proteins bind a Cas9 guide RNA, are thereby directed to a specific sequence within a target nucleic acid (a target site), and cleave the target nucleic acid (e.g., cleave dsDNA to generate a double strand break, cleave ssDNA, cleave ssRNA, etc.). A chimeric Cas9 protein is a fusion protein comprising a Cas9 polypeptide that is fused to a heterologous protein (referred to as a fusion partner), where the heterologous protein provides an activity (e.g., one that is not provided by the Cas9 protein). The fusion partner can provide an activity, e.g., enzymatic activity (e.g., nuclease activity, activity for DNA and/or RNA methylation, activity for DNA and/or RNA cleavage, activity for histone acetylation, activity for histone methylation, activity for RNA modification, activity for RNA-binding, activity for RNA splicing etc.). In some cases a portion of the Cas9 protein (e.g., the RuvC domain and/or the HNH domain) exhibits reduced nuclease activity relative to the corresponding portion of a wild type Cas9 protein (e.g., in some cases the Cas9 protein is a nickase). In some cases, the Cas9 protein is enzymatically inactive, or has reduced enzymatic activity relative to a wild-type Cas9 protein (e.g., relative to Streptococcus pyogenes Cas9).

[0255] Assays to determine whether given protein interacts with a Cas9 guide RNA can be any convenient binding assay that tests for binding between a protein and a nucleic acid. Suitable binding assays (e.g., gel shift assays) will be known to one of ordinary skill in the art (e.g., assays that include adding a Cas9 guide RNA and a protein to a target nucleic acid).

[0256] Assays to determine whether a protein has an activity (e.g., to determine if the protein has nuclease activity that cleaves a target nucleic acid and/or some heterologous activity) can be any convenient assay (e.g., any convenient nucleic acid cleavage assay that tests for nucleic acid cleavage). Suitable assays (e.g., cleavage assays) will be known to one of ordinary skill in the art and can include adding a Cas9 guide RNA and a protein to a target nucleic acid.

[0257] Many Cas9 orthologs from a wide variety of species have been identified and in some cases the proteins share only a few identical amino acids. Identified Cas9 orthologs have similar domain architecture with a central HNH endonuclease domain and a split RuvC/RNaseH domain (e.g., RuvCI, RuvCII, and RuvCIII) (e.g., see Table 1). For example, a Cas9 protein can have 3 different regions (sometimes referred to as RuvC-I, RuvC-II, and RucC-III), that are not contiguous with respect to the primary amino acid sequence of the Cas9 protein, but fold together to form a RuvC domain once the protein is produced and folds. Thus, Cas9 proteins can be said to share at least 4 key motifs with a conserved architecture. Motifs 1, 2, and 4 are RuvC like motifs while motif 3 is an HNH-motif. The motifs set forth in Table 1 may not represent the entire RuvC-like and/or HNH domains as accepted in the art, but Table 1 does present motifs that can be used to help determine whether a given protein is a Cas9 protein. In some cases, the methods and compositions of the present disclosure include a Cas9 ortholog as described herein.

TABLE 1
Table 1 lists 4 motifs that are present in Cas9 sequences
from various species. The amino acids listed in Table 1 are
from the Cas9 from S. pyogenes (SEQ ID NO: 5).

| Motif # | Motif | Amino acids (residue #s) | Highly conserved |
|---|---|---|---|
| 1 | RuvC-like I | IGLDIGTNSVGWAVI (7-21) | D10, G12, G17 |
| | | (SEQ ID NO: 1) | |
| 2 | RuvC-like II | IVIEMARE (759-766) | E762 |
| | | (SEQ ID NO: 2) | |
| 3 | HNH-motif | DVDHIVPQSFLKDDSIDNKVLTRSDK | H840, N854, N863 |
| | | N (837-863) (SEQ ID NO: 3) | |
| 4 | RuvC-like | HHAHDAYL (982-989) | H982, H983, A984, |
| | III | (SEQ ID NO: 4) | D986, A987 |

[0258] In some cases, a suitable Cas9 protein comprises an amino acid sequence having 4 motifs, each of motifs 1-4 having 60% or more, 70% or more, 75% or more, 80% or more, 85% or more, 90% or more, 95% or more, 99% or more or 100% amino acid sequence identity to motifs 1-4 as set forth in SEQ ID NOs: 1-4, respectively (e.g., see Table 1), or to the corresponding portions in any of the amino acid sequences set forth in SEQ ID NOs: 5-816.

[0259] In other words, in some cases, a suitable Cas9 polypeptide comprises an amino acid sequence having 4 motifs, each of motifs 1-4 having 60% or more, 70% or more, 75% or more, 80% or more, 85% or more, 90% or more, 95% or more, 99% or more or 100% amino acid sequence identity to motifs 1-4 of the Cas9 amino acid sequence set forth in SEQ ID NO: 5 (e.g., the sequences set forth in SEQ ID NOs: 1-4, e.g., see Table 1), or to the corresponding portions in any of the amino acid sequences set forth in SEQ ID NOs: 6-816.

[0260] In some cases, a suitable Cas9 protein comprises an amino acid sequence having 4 motifs, each of motifs 1-4 having 60% or more amino acid sequence identity to motifs 1-4 of the Cas9 amino acid sequence set forth as SEQ ID NO: 5 (the motifs are in Table 1, and are set forth as SEQ ID NOs: 1-4, respectively), or to the corresponding portions in any of the amino acid sequences set forth in SEQ ID NOs: 6-816. In some cases, a suitable Cas9 protein comprises an amino acid sequence having 4 motifs, each of motifs 1-4 having 70% or more amino acid sequence identity to motifs 1-4 of the Cas9 amino acid sequence set forth as SEQ ID NO: 5 (the motifs are in Table 1, and are set forth as SEQ ID NOs: 1-4, respectively), or to the corresponding portions in any of the amino acid sequences set forth in SEQ ID NOs: 6-816. In some cases, a suitable Cas9 protein comprises an amino acid sequence having 4 motifs, each of motifs 1-4 having 75% or more amino acid sequence identity to motifs 1-4 of the Cas9 amino acid sequence set forth as SEQ ID NO: 5 (the motifs are in Table 1, and are set forth as SEQ ID NOs: 1-4, respectively), or to the corresponding portions in any of the amino acid sequences set forth in SEQ ID NOs: 6-816. In some cases, a suitable Cas9 protein comprises an amino acid sequence having 4 motifs, each of motifs 1-4 having 80% or more amino acid sequence identity to motifs 1-4 of the Cas9 amino acid sequence set forth as SEQ ID NO: 5 (the motifs are in Table 1, and are set forth as SEQ ID NOs: 1-4, respectively), or to the corresponding portions in any of the amino acid sequences set forth in SEQ ID NOs: 6-816. In some cases, a suitable Cas9 protein comprises an amino acid sequence having 4 motifs, each of motifs 1-4 having 85% or more amino acid sequence identity to motifs 1-4 of the Cas9 amino acid sequence set forth as SEQ ID NO: 5 (the motifs are in Table 1, and are set forth as SEQ ID NOs: 1-4, respectively), or to the corresponding portions in any of the amino acid sequences set forth in SEQ ID NOs: 6-816. In some cases, a suitable Cas9 protein comprises an amino acid sequence having 4 motifs, each of motifs 1-4 having 90% or more amino acid sequence identity to motifs 1-4 of the Cas9 amino acid sequence set forth as SEQ ID NO: 5 (the motifs are in Table 1, and are set forth as SEQ ID NOs: 1-4, respectively), or to the corresponding portions in any of the amino acid sequences set forth in SEQ ID NOs: 6-816. In some cases, a suitable Cas9 protein comprises an amino acid sequence having 4 motifs, each of motifs 1-4 having 95% or more amino acid sequence identity to motifs 1-4 of the Cas9 amino acid sequence set forth as SEQ ID NO: 5 (the motifs are in Table 1, and are set forth as SEQ ID NOs: 1-4, respectively), or to the corresponding portions in any of the amino acid sequences set forth in SEQ ID NOs: 6-816. In some cases, a suitable Cas9 protein comprises an amino acid sequence having 4 motifs, each of motifs 1-4 having 99% or more amino acid sequence identity to motifs 1-4 of the Cas9 amino acid sequence set forth as SEQ ID NO: 5 (the motifs are in Table 1, and are set forth as SEQ ID NOs: 1-4, respectively), or to the corresponding portions in any of the amino acid sequences set forth in SEQ ID NOs: 6-816. In some cases, a suitable Cas9 protein comprises an amino acid sequence having 4 motifs, each of motifs 1-4 having 100% amino acid sequence identity to motifs 1-4 of the Cas9 amino acid sequence set forth as SEQ ID NO: 5 (the motifs are in Table 1, and are set forth as SEQ ID NOs: 1-4, respectively), or to the corresponding portions in any of the amino acid sequences set forth in SEQ ID NOs: 6-816. Any Cas9 protein as defined above can be used as a Cas9 polypeptide, as part of a chimeric Cas9 polypeptide (e.g., a Cas9 fusion protein), any of which can be used in an RNP of the present disclosure.

[0261] In some cases, a suitable Cas9 protein comprises an amino acid sequence having 60% or more, 70% or more, 75% or more, 80% or more, 85% or more, 90% or more, 95% or more, 99% or more or 100% amino acid sequence identity to amino acids 7-166 or 731-1003 of the Cas9 amino acid sequence set forth in SEQ ID NO: 5, or to the corresponding portions in any of the amino acid sequences set forth as SEQ ID NOs: 6-816.

[0262] In some cases, a suitable Cas9 protein comprises an amino acid sequence having 60% or more amino acid sequence identity to amino acids 7-166 or 731-1003 of the Cas9 amino acid sequence set forth in SEQ ID NO: 5, or to the corresponding portions in any of the amino acid sequences set forth as SEQ ID NOs: 6-816. In some cases, a suitable Cas9 protein comprises an amino acid sequence having 70% or more amino acid sequence identity to amino acids 7-166 or 731-1003 of the Cas9 amino acid sequence set forth in SEQ ID NO: 5, or to the corresponding portions in any of the amino acid sequences set forth as SEQ ID NOs: 6-816. In some cases, a suitable Cas9 protein comprises an amino acid sequence having 75% or more amino acid sequence identity to amino acids 7-166 or 731-1003 of the Cas9 amino acid sequence set forth in SEQ ID NO: 5, or to the corresponding portions in any of the amino acid sequences set forth as SEQ ID NOs: 6-816. In some cases, a suitable Cas9 protein comprises an amino acid sequence having 80% or more amino acid sequence identity to amino acids 7-166 or 731-1003 of the Cas9 amino acid sequence set forth in SEQ ID NO: 5, or to the corresponding portions in any of the amino acid sequences set forth as SEQ ID NOs: 6-816. In some cases, a suitable Cas9 protein comprises an amino acid sequence having 85% or more amino acid sequence identity to amino acids 7-166 or 731-1003 of the Cas9 amino acid sequence set forth in SEQ ID NO: 5, or to the corresponding portions in any of the amino acid sequences set forth as SEQ ID NOs: 6-816. In some cases, a suitable Cas9 protein comprises an amino acid sequence having 90% or more amino acid sequence identity to amino acids 7-166 or 731-1003 of the Cas9 amino acid sequence set forth in SEQ ID NO: 5, or to the corresponding portions in any of the amino acid sequences set forth as SEQ ID NOs: 6-816. In some cases, a suitable Cas9 protein comprises an amino acid sequence having 95% or more amino acid sequence identity to amino acids 7-166 or 731-1003 of the Cas9 amino acid sequence set forth in SEQ ID NO: 5, or to the corresponding portions in any of the amino acid sequences set forth as SEQ ID NOs: 6-816. In some cases, a suitable Cas9 protein comprises an amino acid sequence having 99% or more amino acid sequence identity to amino acids 7-166 or 731-1003 of the Cas9 amino acid sequence set forth in SEQ ID NO: 5, or to the corresponding portions in any of the amino acid sequences set forth as SEQ ID NOs: 6-816. In some cases, a suitable Cas9 protein comprises an amino acid sequence having 100% amino acid sequence identity to amino acids 7-166 or 731-1003 of the Cas9 amino acid sequence set forth in SEQ ID NO: 5, or to the corresponding portions in any of the amino acid sequences set forth as SEQ ID NOs: 6-816. Any Cas9 protein as defined above can be used as a Cas9 polypeptide, as part of a chimeric Cas9 polypeptide (e.g., a Cas9 fusion protein), any of which can be used in an RNP of the present disclosure.

[0263] In some cases, a suitable Cas9 protein comprises an amino acid sequence having 60% or more, 70% or more, 75% or more, 80% or more, 85% or more, 90% or more, 95% or more, 99% or more or 100% amino acid sequence identity to the Cas9 amino acid sequence set forth in SEQ ID NO: 5, or to any of the amino acid sequences set forth as SEQ ID NOs: 6-816.

[0264] In some cases, a suitable Cas9 protein comprises an amino acid sequence having 60% or more amino acid sequence identity to the Cas9 amino acid sequence set forth in SEQ ID NO: 5, or to any of the amino acid sequences set forth as SEQ ID NOs: 6-816. In some cases, a suitable Cas9 protein comprises an amino acid sequence having 70% or more amino acid sequence identity to the Cas9 amino acid sequence set forth in SEQ ID NO: 5, or to any of the amino acid sequences set forth as SEQ ID NOs: 6-816. In some cases, a suitable Cas9 protein comprises an amino acid sequence having 75% or more amino acid sequence identity to the Cas9 amino acid sequence set forth in SEQ ID NO: 5, or to any of the amino acid sequences set forth as SEQ ID NOs: 6-816. In some cases, a suitable Cas9 protein comprises an amino acid sequence having 80% or more amino acid sequence identity to the Cas9 amino acid sequence set forth in SEQ ID NO: 5, or to any of the amino acid sequences set forth as SEQ ID NOs: 6-816. In some cases, a suitable Cas9 protein comprises an amino acid sequence having 85% or more amino acid sequence identity to the Cas9 amino acid sequence set forth in SEQ ID NO: 5, or to any of the amino acid sequences set forth as SEQ ID NOs: 6-816. In some cases, a suitable Cas9 protein comprises an amino acid sequence having 90% or more amino acid sequence identity to the Cas9 amino acid sequence set forth in SEQ ID NO: 5, or to any of the amino acid sequences set forth as SEQ ID NOs: 6-816. In some cases, a suitable Cas9 protein comprises an amino acid sequence having 95% or more amino acid sequence identity to the Cas9 amino acid sequence set forth in SEQ ID NO: 5, or to any of the amino acid sequences set forth as SEQ ID NOs: 6-816. In some cases, a suitable Cas9 protein comprises an amino acid sequence having 99% or more amino acid sequence identity to the Cas9 amino acid sequence set forth in SEQ ID NO: 5, or to any of the amino acid sequences set forth as SEQ ID NOs: 6-816. In some cases, a suitable Cas9 protein comprises an amino acid sequence having 100% amino acid sequence identity to the Cas9 amino acid sequence set forth in SEQ ID NO: 5, or to any of the amino acid sequences set forth as SEQ ID NOs: 6-816. Any Cas9 protein as defined above can be used as a Cas9 polypeptide, as part of a chimeric Cas9 polypeptide (e.g., a Cas9 fusion protein), any of which can be used in an RNP of the present disclosure.

[0265] In some cases, a Cas9 protein comprises 4 motifs (as listed in Table 1), at least one with (or each with) amino acid sequences having 75% or more, 80% or more, 85% or more, 90% or more, 95% or more, 99% or more or 100% amino acid sequence identity to each of the 4 motifs listed in Table 1 (SEQ ID NOs:1-4), or to the corresponding portions in any of the amino acid sequences set forth as SEQ ID NOs: 6-816.

[0266] Examples of various Cas9 proteins (and Cas9 domain structure) and Cas9 guide RNAs (as well as information regarding requirements related to protospacer adjacent motif (PAM) sequences present in targeted nucleic acids) can be found in the art, for example, see Jinek et al., Science. 2012 Aug. 17; 337(6096):816-21; Chylinski et al., RNA Biol. 2013 May; 10(5):726-37; Ma et al., Biomed Res Int. 2013; 2013:270805; Hou et al., Proc Natl Acad Sci USA. 2013 Sep. 24; 110(39):15644-9; Jinek et al., Elife. 2013; 2:e00471; Pattanayak et al., Nat Biotechnol. 2013 September; 31(9):839-43; Qi et al., Cell. 2013 Feb. 28; 152(5):1173-83; Wang et al., Cell. 2013 May 9; 153(4):910-8; Auer et al., Genome Res. 2013 Oct. 31; Chen et al., Nucleic Acids Res. 2013 Nov. 1; 41(20):e19; Cheng et al., Cell Res. 2013 October; 23(10):1163-71; Cho et al., Genetics. 2013 November; 195(3):1177-80; DiCarlo et al., Nucleic Acids Res. 2013 April; 41(7):4336-43; Dickinson et al., Nat Methods. 2013 October; 10(10):1028-34; Ebina et al., Sci Rep. 2013; 3:2510; Fujii et al., Nucleic Acids Res. 2013 Nov. 1; 41(20):e187; Hu et al., Cell Res. 2013 November; 23(11):1322-5; Jiang et al., Nucleic Acids Res. 2013 Nov. 1; 41(20):e188; Larson et al., Nat Protoc. 2013 November; 8(11):2180-96; Mali et al., Nat Methods. 2013 October; 10(10):957-63; Nakayama et al., Genesis. 2013 December; 51(12):835-43; Ran et al., Nat Protoc. 2013 November; 8(11):2281-308; Ran et al., Cell. 2013 Sep. 12; 154(6):1380-9; Upadhyay et al., G3 (Bethesda). 2013 Dec. 9; 3(12):2233-8; Walsh et al., Proc Natl Acad Sci USA. 2013 Sep. 24; 110(39):15514-5; Xie et al., Mol Plant. 2013 Oct. 9; Yang et al., Cell. 2013 Sep. 12; 154(6):1370-9; Briner et al., Mol Cell. 2014 Oct. 23; 56(2):333-9; Shmakov et al., Nat Rev Microbiol. 2017 March; 15(3):169-182; and U.S. patents and patent applications: U.S. Pat. Nos. 8,906,616; 8,895,308; 8,889,418; 8,889,356; 8,871,445; 8,865,406; 8,795,965; 8,771,945; 8,697,359; 20140068797; 20140170753; 20140179006; 20140179770; 20140186843; 20140186919; 20140186958; 20140189896; 20140227787; 20140234972; 20140242664; 20140242699; 20140242700; 20140242702; 20140248702; 20140256046; 20140273037; 20140273226; 20140273230; 20140273231; 20140273232; 20140273233; 20140273234; 20140273235; 20140287938; 20140295556; 20140295557; 20140298547; 20140304853; 20140309487; 20140310828; 20140310830; 20140315985; 20140335063; 20140335620; 20140342456; 20140342457; 20140342458; 20140349400; 20140349405; 20140356867; 20140356956; 20140356958; 20140356959; 20140357523; 20140357530; 20140364333; and 20140377868; each of which is hereby incorporated by reference in its entirety.

Variant Cas9 Proteins—Nickases and dCas9

[0267] In some cases, a Cas9 protein is a variant Cas9 protein. A variant Cas9 protein has an amino acid sequence that is different by at least one amino acid (e.g., has a deletion, insertion, substitution, fusion) when compared to the amino acid sequence of a corresponding wild type Cas9 protein. In some instances, the variant Cas9 protein has an amino acid change (e.g., deletion, insertion, or substitution) that reduces the nuclease activity of the Cas9 protein. For example, in some instances, the variant Cas9 protein has 50% or less, 40% or less, 30% or less, 20% or less, 10% or less, 5% or less, or 1% or less of the nuclease activity of the corresponding wild-type Cas9 protein. In some cases, the variant Cas9 protein has no substantial nuclease activity. When a Cas9 protein is a variant Cas9 protein that has no substantial nuclease activity, it can be referred to as a nuclease defective Cas9 protein or “dCas9” for “dead” Cas9. A protein (e.g., a class 2 CRISPR/Cas protein, e.g., a Cas9 protein) that cleaves one strand but not the other of a double stranded target nucleic acid is referred to herein as a “nickase” (e.g., a “nickase Cas9”).

[0268] In some cases, a variant Cas9 protein can cleave the complementary strand (sometimes referred to in the art as the target strand) of a target nucleic acid but has reduced ability to cleave the non-complementary strand (sometimes referred to in the art as the non-target strand) of a target nucleic acid. For example, the variant Cas9 protein can have a mutation (amino acid substitution) that reduces the function of the RuvC domain. Thus, the Cas9 protein can be a nickase that cleaves the complementary strand, but does not cleave the non-complementary strand. As a non-limiting example, in some cases, a variant Cas9 protein has a mutation at an amino acid position corresponding to residue D10 (e.g., D10A, aspartate to alanine) of SEQ ID NO: 5 (or the corresponding position of any of the proteins set forth in SEQ ID NOs: 6-261 and 264-816) and can therefore cleave the complementary strand of a double stranded target nucleic acid but has reduced ability to cleave the non-complementary strand of a double stranded target nucleic acid (thus resulting in a single strand break (SSB) instead of a double strand break (DSB) when the variant Cas9 protein cleaves a double stranded target nucleic acid) (see, for example, Jinek et al., Science. 2012 Aug. 17; 337(6096):816-21). See, e.g., SEQ ID NO: 262.

[0269] In some cases, a variant Cas9 protein can cleave the non-complementary strand of a target nucleic acid but has reduced ability to cleave the complementary strand of the target nucleic acid. For example, the variant Cas9 protein can have a mutation (amino acid substitution) that reduces the function of the HNH domain. Thus, the Cas9 protein can be a nickase that cleaves the non-complementary strand, but does not cleave the complementary strand. As a non-limiting example, in some cases, the variant Cas9 protein has a mutation at an amino acid position corresponding to residue H840 (e.g., an H840A mutation, histidine to alanine) of SEQ ID NO: 5 (or the corresponding position of any of the proteins set forth as SEQ ID NOs: 6-261 and 264-816) and can therefore cleave the non-complementary strand of the target nucleic acid but has reduced ability to cleave (e.g., does not cleave) the complementary strand of the target nucleic acid. Such a Cas9 protein has a reduced ability to cleave a target nucleic acid (e.g., a single stranded target nucleic acid) but retains the ability to bind a target nucleic acid (e.g., a single stranded target nucleic acid). See, e.g., SEQ ID NO: 263.

[0270] In some cases, a variant Cas9 protein has a reduced ability to cleave both the complementary and the non-complementary strands of a double stranded target nucleic acid. As a non-limiting example, in some cases, the variant Cas9 protein harbors mutations at amino acid positions corresponding to residues D10 and H840 (e.g., D10A and H840A) of SEQ ID NO: 5 (or the corresponding residues of any of the proteins set forth as SEQ ID NOs: 6-261 and 264-816) such that the polypeptide has a reduced ability to cleave (e.g., does not cleave) both the complementary and the non-complementary strands of a target nucleic acid. Such a Cas9 protein has a reduced ability to cleave a target nucleic acid (e.g., a single stranded or double stranded target nucleic acid) but retains the ability to bind a target nucleic acid. A Cas9 protein that cannot cleave target nucleic acid (e.g., due to one or more mutations, e.g., in the catalytic domains of the RuvC and HNH domains) is referred to as a “dead” Cas9 or simply “dCas9.” See, e.g., SEQ ID NO: 264.

[0271] Other residues can be mutated to achieve the above effects (i.e. inactivate one or the other nuclease portions). As non-limiting examples, residues D10, G12, G17, E762, H840, N₈₅₄, N₈₆₃, H982, H983, A984, D986, and/or A987 of SEQ ID NO: 5 (or the corresponding mutations of any of the proteins set forth as SEQ ID NOs: 6-816) can be altered (i.e., substituted). Also, mutations other than alanine substitutions are suitable.

[0272] In some cases, a variant Cas9 protein that has reduced catalytic activity (e.g., when a Cas9 protein has a D10, G12, G17, E762, H840, N₈₅₄, N₈₆₃, H982, H983, A984, D986, and/or a A987 mutation of SEQ ID NO: 5 or the corresponding mutations of any of the proteins set forth as SEQ ID NOs: 6-816, e.g., D10A, G12A, G17A, E762A, H840A, N₈₅₄A, N₈₆₃A, H982A, H983A, A984A, and/or D986A), the variant Cas9 protein can still bind to target nucleic acid in a site-specific manner (because it is still guided to a target nucleic acid sequence by a Cas9 guide RNA) as long as it retains the ability to interact with the Cas9 guide RNA.

[0273] In addition to the above, a variant Cas9 protein can have the same parameters for sequence identity as described above for Cas9 proteins. Thus, in some cases, a suitable variant Cas9 protein comprises an amino acid sequence having 4 motifs, each of motifs 1-4 having 60% or more, 70% or more, 75% or more, 80% or more, 85% or more, 90% or more, 95% or more, 99% or more or 100% amino acid sequence identity to motifs 1-4 of the Cas9 amino acid sequence set forth as SEQ ID NO: 5 (the motifs are in Table 1, above, and are set forth as SEQ ID NOs: 1-4, respectively), or to the corresponding portions in any of the amino acid sequences set forth in SEQ ID NOs: 6-816.

[0274] In some cases, the variant Cas9 protein is a dCas9 fused to a transcriptional repressor using CRISPRi (e.g., the KRAB domain of Kox1, the CS domain of HP1α, or the WRPW domain of Hes1; see e.g. Gilbert et al., Cell (2013) 154(2):442-451, which is hereby incorporated by reference in its entirety)); or fused to an activation domain (e.g., VP64, p65 and RTA, see e.g., Gilbert et al. ibid) as using CRISPRa.

[0275] In some cases, the variant Cas9 protein is a Cas9 nickase and is fused to a base editor. In some cases, the base editor comprises a Cas9 fused to a cytidine deaminase enables a cytidine to uridine conversion resulting in a C to T conversion in a target sequence. In some cases, the base editor comprises a Cas9 fused to an adenine deaminase that enables an adenine to inosine conversion, leading to an A to G conversion in a target sequence (see e.g., Gaudelli et al, Nature (2017) 551:464-471), which is hereby incorporated by reference in its entirety.

### Targeting Moiety

[0276] In some cases, a system of the present disclosure comprises an RNA-guided CRISPR/Cas effector polypeptide, where the RNA-guided CRISPR/Cas effector polypeptide is modified to include a targeting moiety that provides for cell type-selective binding or tissue-selective binding. Suitable targeting moieties include but are not limited to, an antibody, a ligand-binding portion of a receptor, or a ligand for a receptor.

[0277] The targeting moiety may be used to target the delivery of a cargo RNA to specific cell types, resulting in the delivery of the cargo RNA to the specific targeted cell type. A targeting moiety may selectively bind a target molecule of the target cell, e.g., a target moiety present on the surface of the target cell. For example, the targeting moiety may be an antibody, a receptor, a ligand for a receptor, an aptamer, a small molecule, or a variant thereof.

[0278] Any of a variety of cell types can be targeted. Examples include, but are not limited to, stem cells, neurons, epithelial cells and/or dermal cells, adipocytes, cardiomyocytes, renal cells, myocytes, hepatocytes, chondrocytes, islet cells, endothelial cells, dental pulp cells, and osteoblasts. In some cases, the target cell is a diseased cell, e.g., a cancer cell, a virus-infected cell, and the like. In some cases, the target cell is a blood cell, e.g. a T cell, macrophage, NK cell, B cell, megakaryocyte and the like. In some cases, the target is a stem cell including for example a hematopoietic stem cell, a mesenchymal stem cell, a neural stem cell, a pulmonary stem cell, a muscle stem cell and an induced pluripotent stem cell (iPSC).

[0279] For example, in some cases, the targeting moiety binds an integrin, where suitable integrins include, e.g., an α1β1, α2β1, α4β1, α5β1, α6β1, αL132, αMβ2, αIIbβ3, αVβ3, αVβ5, αVβ6, or a α6β4 integrin. In some cases, the targeting moiety binds a receptor, such as an EGF receptor (ErbB family), an insulin receptor, a platelet derived growth factor receptor, a fibroblast growth factor receptor, a vascular endothelial growth factor receptor, a human growth factor receptor, a Trk receptor, an Eph receptor, an AXL receptor, an LTK receptor, a TIE receptor, an ROR receptor, a DDR receptor, a RET receptor, a KLG receptor, a RYK receptor, a T cell receptor (TCR), a B cell receptor (BCR), a NK cell receptor (NKR), or a MuSK receptor. In some cases, the targeting moiety binds a G-protein coupled receptor (GPCR), e.g., where the GPCR is a rhodopsin-like receptor, a secretin receptor, a metabotropic glutamate/pheromone receptor, a cyclic AMP receptor, a frizzled/smoothened receptor, CXCR4, CCR5, or a beta-adrenergic receptor.

[0280] In some cases, the targeting moiety binds an antigen selected from CEACAM6, c-Met, EGFR, ErbB2, ErbB3, ErbB4, EphA2, IGF1R, GHRHR, GHR, FLT1, KDR, FLT4, CD44v6, CA125, CEA, BTLA, TGFBR2, TGFBR1, IL6R, gp130, TNFR1, TNFR2, PD1, PD-L1, PD-L2, HVEM, mesothelin, PSMA, RANK, ROR1, TNFRSF4, TWEAK-R, HLA, tumor or pathogen derived peptides bound to HLA (such as from hTERT, tyrosinase, or WT-1), LTβR, LIFRβ, LRP5, MUC1, OSMRβ, TCRα, TCRβ, B7H4, TLR7, TLR9, PTCH1, PTCH1, Robol, α-fetoprotein (AFP), and Frizzled.

[0281] An antibody can be used as a targeting moiety, e.g., where the antibody is specific for a target molecule on a target cell. For example, in some cases, a targeting moiety is an antibody that binds a tumor-associated or tumor-specific antigen. Some non-limiting examples of tumor antigens include, A33; BAGE; Bcl-2; β-catenin; CA125; CA19-9; CD5; CD19; CD20; CD21; CD22; CD33; CD37; CD45; CD123; CEA; c-Met; CS-1; cyclin B1; DAGE; EBNA; EGFR; ephrinB2; estrogen receptor; FAP; ferritin; folate-binding protein; GAGE; G250; GD-2; GM2; gp75, gp100 (Pmel 17); HER-2/neu; HPV E6; HPV E7; Ki-67; LRP; mesothelin, p53, PRAME; progesterone receptor; PSA; PSMA; MAGE; MART; MUC; MUM-1-B; myc; NYESO-1; ras; RORI; survivin; tenascin; TSTA tyrosinase; VEGF; and WT1. For example, the following cancer cells can be targeted by targeting the associated antigens: leukemia/lymphoma (CD19, CD20, CD22, ROR1, CD33); multiple myeloma (B-cell maturation antigen (BCMA)); prostate cancer (PSMA, WT1, Prostate Stem Cell antigen (PSCA), SV40 T); breast cancer (HER2, ERBB2); stem cell cancer (CD133); ovarian cancer (L1-CAM, extracellular domain of MUC16 (MUC-CD), folate binding protein (folate receptor), Lewis Y); renal cell carcinoma (carboxy-anhydrase-IX (CAIX); melanoma (GD2); and pancreatic cancer (mesothelin, CEA, CD24).

[0282] In some cases, the RNA-guided CRISPR/Cas effector polypeptide comprises a targeting moiety that binds hepatocytes, where the targeting moiety binds to asialoglycoprotein receptor (ASGPR). See, e.g., WO 2017/083368; and Rouet et al. (2018) J. Am. Chem. Soc. 140:6596.

[0283] In some cases, the targeting moiety binds an antigen present on a virus-infected cell. Examples of viruses include adenoviruses, arenaviruses, bunyaviruses, coronavirusess, flavirviruses, hantaviruses, hepadnaviruses, herpesviruses, papilomaviruses, paramyxoviruses, parvoviruses, picornaviruses, poxviruses, orthomyxoviruses, retroviruses, reoviruses, rhabdoviruses, rotaviruses, spongiform viruses or togaviruses. In other instances, viral antigen markers include peptides expressed by CMV (cytomegalovirus), cold viruses, Epstein-Barr, flu viruses, hepatitis A, B, and C viruses, herpes simplex, HIV, influenza, Japanese encephalitis, measles, polio, rabies, respiratory syncytial, rubella, smallpox, varicella zoster or West Nile virus.

[0284] Examples of viral antigens include the following: cytomegaloviral antigens include envelope glycoprotein B and CMV pp65; Epstein-Barr antigens include EBV EBNAI, EBV P18, and EBV P23; hepatitis antigens include the S, M, and L proteins of hepatitis B virus, the pre-S antigen of hepatitis B virus, HBCAG DELTA, HBV HBE, hepatitis C viral RNA, HCV NS3 and HCV NS4; herpes simplex viral antigens include immediate early proteins and glycoprotein D; HIV antigens include gene products of the gag, pol, and env genes such as HIV gp32, HIV gp41, HIV gp120, HIV gp160, HIV P17/24, HIV P24, HIV P55 GAG, HIV P66 POL, HIV TAT, HIV GP36, the Nef protein and reverse transcriptase; influenza antigens include hemagglutinin and neuraminidase; Japanese encephalitis viral antigens include proteins E, M-E, M-E-NS1, NS1, and NS1-NS2A; measles antigens include the measles virus fusion protein; rabies antigens include rabies glycoprotein and rabies nucleoprotein; respiratory syncytial viral antigens include the RSV fusion protein and the M2 protein; rotaviral antigens include VP7sc; rubella antigens include proteins E1 and E2; and varicella zoster viral antigens include gpl and gpll.

[0285] In some cases, the targeting moiety is an antibody that binds to an antigen present on the surface of a specific cell type. The cell type may be a stem cell, such as a pluripotent stem cell. Some non-limiting examples of antigens specific to pluripotent stem cells include Oct4 and Nanog. In addition to Oct4, Sox2 and Nanog, many other pluripotent stem cell markers have been identified, including Sa114, Dax1, Essrb, Tbx3, Tcl1, Rif1, Nac1 and Zfp281. The targeting moiety may also bind to an antigen of a differentiated cell type. For example, the targeting moiety may bind to an antigen specific for a lung epithelial cell to direct the delivery of a cargo RNA to lung epithelial cells. As a non-limiting example, a targeting moiety may bind to the alveolar epithelial type 1 cell specific protein RTI₄₀ or HTI₅₆ to deliver cargo RNA to alveolar epithelial type 1 cells. As another example, the targeting moiety may bind a mucin, such as muc5ac, or muc5b. It should be appreciated that the examples of antigens provided in this application are not limiting and the targeting moiety may be any moiety capable of binding any cellular antigen known in the art.

### Methods

[0286] The present disclosure provides a method of delivering a cargo RNA to a eukaryotic cell. The present disclosure provides a method of delivering a cargo RNA to the cytoplasm of a eukaryotic cell. The methods comprise contacting the eukaryotic cell with a system of the present disclosure. In some cases, the eukaryotic cell is in vitro. In some cases, the eukaryotic cell is in vivo. In some cases, the eukaryotic cell is ex vivo.

[0287] The present disclosure provides a method of delivering an RNA-guided effector polypeptide/guide RNA ribonucleoprotein (RNP) to a eukaryotic cell, the method comprising contacting the cell with the system of the present disclosure, where the system comprises: i) a modified guide RNA comprising a guide RNA that is modified to include binding sites for an RBP present in a modified RBP; ii) a modified RBP; and iii) an RNA-guided CRISRP/Cas effector polypeptide, where the RNA-guided CRISRP/Cas effector polypeptide is complexed with the guide RNA. In some cases, the eukaryotic cell is in vitro. In some cases, the eukaryotic cell is in vivo. In some cases, the eukaryotic cell is ex vivo.

[0288] In some case, the eukaryotic cell is selected from the group consisting of: a plant cell, a fungal cell, a single cell eukaryotic organism, a mammalian cell, a reptile cell, an insect cell, an avian cell, a fish cell, a parasite cell, an arthropod cell, a cell of an invertebrate, a cell of a vertebrate, a rodent cell, a mouse cell, a rat cell, a primate cell, a non-human primate cell, and a human cell.

[0289] In some cases, the eukaryotic cell is in vivo in an organism, and the method comprises administering a system of the present disclosure to the organism. In some cases, the organism is a human. In some cases, the organism is a non-human organism. In some cases, the non-human organism is selected from the group consisting of a plant, a fungus, a non-human mammal, an insect, a reptile, a bird, a fish, a parasite, an arthropod, an invertebrate, and a vertebrate.

[0290] Routes of administration that are suitable for use in a method of the present disclosure include various enteral and parenteral routes of administration, including, e.g., intratumoral, peritumoral, intramuscular, intratracheal, intracranial, subcutaneous, intradermal, topical application, intravenous, intraarterial, rectal, nasal, oral, and other enteral and parenteral routes of administration.

[0291] A system of the present disclosure can be present in a composition, e.g., a pharmaceutical composition. A composition of the present disclosure can comprise, in addition to a system of the present disclosure, one or more of: a salt, e.g., NaCl, MgCl₂, KCl, MgSO₄, etc.; a buffering agent, e.g., a Tris buffer, N-(2-Hydroxyethyl)piperazine-N′-(2-ethanesulfonic acid) (HEPES), 2-(N-Morpholino)ethanesulfonic acid (MES), 2-(N-Morpholino)ethanesulfonic acid sodium salt (MES), 3-(N-Morpholino)propanesulfonic acid (MOPS), N-tris[Hydroxymethyl]methyl-3-aminopropanesulfonic acid (TAPS), etc.; a solubilizing agent; a detergent, e.g., a non-ionic detergent such as Tween-20, etc.; a nuclease inhibitor; glycerol; and the like.

[0292] The present disclosure provides a composition comprising: a) a system of the present disclosure; and b) a pharmaceutically acceptable excipient. A composition of the present disclosure may comprise a pharmaceutically acceptable excipient, a variety of which are known in the art and need not be discussed in detail herein. Pharmaceutically acceptable excipients have been amply described in a variety of publications, including, for example, “Remington: The Science and Practice of Pharmacy”, 19^{th} Ed. (1995), or latest edition, Mack Publishing Co; A. Gennaro (2000) “Remington: The Science and Practice of Pharmacy”, 20th edition, Lippincott, Williams, & Wilkins; Pharmaceutical Dosage Forms and Drug Delivery Systems (1999) H. C. Ansel et al., eds 7^{th} ed., Lippincott, Williams, & Wilkins; and Handbook of Pharmaceutical Excipients (2000) A. H. Kibbe et al., eds., 3^{rd} ed. Amer. Pharmaceutical Assoc.

### Examples of Non-Limiting Aspects of the Disclosure

[0293] Aspects, including embodiments, of the present subject matter described above may be beneficial alone or in combination, with one or more other aspects or embodiments. Without limiting the foregoing description, certain non-limiting aspects of the disclosure numbered 1-33 are provided below. As will be apparent to those of skill in the art upon reading this disclosure, each of the individually numbered aspects may be used or combined with any of the preceding or following individually numbered aspects. This is intended to provide support for all such combinations of aspects and is not limited to combinations of aspects explicitly provided below:

### ASPECTS A

[0294] Aspect 1. A system comprising:

[0295] a) a modified RNA-binding protein (RBP) comprising:
[0296] i) an RBP; and
[0297] ii) one or more endosomolytic peptides covalently linked, directly or via a linker, to the RBP; and

[0298] b) a modified cargo RNA complexed to the RBP, wherein the modified cargo RNA comprises a cargo RNA modified to include one or more RBP binding sites that are bound by the RBP present in the modified RBP.

[0299] Aspect 2. The system of aspect 1, wherein the RBP comprises an amino acid sequence having at least 85% amino acid sequence identity to the amino acid sequence of an RBP selected from an MS2 polypeptide, a U1A snRNP polypeptide, a PP7 viral coat polypeptide, a poly(A)-binding protein (PABP), a stem-loop binding polypeptide, a boxB polypeptide, a Csy4 polypeptide, a HuA polypeptide, a HuB polypeptide, a HuC polypeptide, a HuD polypeptide, an hnRNP polypeptide, a CArG polypeptide, or an eIF4A polypeptide.

[0300] Aspect 3. The system of aspect 1 or aspect 2, wherein the one or more endosomolytic peptides is activated at low pH.

[0301] Aspect 4. The system of any one of aspects 1-3, wherein the one or more endosomolytic peptides comprises an amino acid sequence selected from

(SEQ ID NO: 817)
GLFHALLHLLHSLWHLLLHA,
(SEQ ID NO: 818)
GLFEAIAEFIENGWEGLIEGWYGGRKKRRQRRR,
(SEQ ID NO: 819)
GPSQPTYPGDDAPVRDLIRFYRDLRRY,
(SEQ ID NO: 820)
WYSCNVCGKAFVLSRHLNRHLRVHRRAT
and
(SEQ ID NO: 821)
HHEHHEHHEHHEHHEHHEHHEHHEHHE.

[0302] Aspect 5. The system of any one of aspects 1-4, wherein the RBP of the modified RBP is linked to the endosomolytic peptide via a cleavable linker.

[0303] Aspect 6. The system of aspect 5, wherein the cleavable linker is an enzyme-cleavable linker, an acid-cleavable linker, or a redox-cleavable linker.

[0304] Aspect 7. The system of any one of aspects 1-6, wherein the modified RBP comprises 2 endosomolytic peptides.

[0305] Aspect 8. The system of any one of aspects 1-6, wherein the modified RBP comprises 3 endosomolytic peptides.

[0306] Aspect 9. The system of any one of aspects 1-6, wherein the modified RBP comprises 4 endosomolytic peptides.

[0307] Aspect 10. The system of any one of aspects 1-9, wherein the cargo RNA comprises a binding site for a polypeptide other than the modified RBP.

[0308] Aspect 11. The system of any one of aspects 1-9, wherein the cargo RNA is a guide RNA comprising:
[0309] i) a targeting segment comprising a nucleotide sequence that hybridizes to a nucleotide sequence in a target nucleic acid; and
[0310] ii) an activation segment comprising a nucleotide sequence that binds to and activates an RNA-guided effector polypeptide.

[0311] Aspect 12. The system of aspect 11, comprising an RNA-guided effector polypeptide.

[0312] Aspect 13. The system of aspect 12, wherein the RNA-guided effector polypeptide is a class 2 CRISPR/Cas effector polypeptide.

[0313] Aspect 14. The system of aspect 13, wherein the class 2 CRISPR/Cas effector polypeptide is a type II CRISPR/Cas effector polypeptide.

[0314] Aspect 15. The system of aspect 13, wherein the class 2 CRISPR/Cas effector polypeptide is a Cas9 protein and the corresponding CRISPR/Cas guide RNA is a Cas9 guide RNA.

[0315] Aspect 16. The system of aspect 13, wherein the class 2 CRISPR/Cas effector polypeptide is a type V or type VI CRISPR/Cas effector polypeptide.

[0316] Aspect 17. The system of aspect 13, wherein the class 2 CRISPR/Cas effector polypeptide is a Cpf1 protein, a C2c1 protein, a C2c3 protein, or a C2c2 protein.

[0317] Aspect 18. The system of aspect 13, wherein the class 2 CRISPR/Cas effector polypeptide is a Cas12 enzyme.

[0318] Aspect 19. The system of aspect 13, wherein the class 2 CRISPR/Cas effector polypeptide is a Cas13 enzyme.

[0319] Aspect 20. The system of aspect 12, wherein the RNA-guided effector enzyme is a base editor.

[0320] Aspect 21. The system of any one of aspects 11-20, wherein the guide RNA comprises one or more nucleic acid modifications.

[0321] Aspect 22. The system of aspect 21, wherein the one or more nucleic acid modifications comprise one or more of a modified nucleobase, a modified backbone or non-natural internucleoside linkage, a modified sugar moiety, a Locked Nucleic Acid, and a Peptide Nucleic acid.

[0322] Aspect 23. The system of any one of aspects 12-22, wherein the RNA-guided effector enzyme comprises a targeting moiety covalently linked to the RNA-guided effector enzyme.

[0323] Aspect 24. The system of aspect 23, wherein the targeting moiety is an antibody, a ligand-binding portion of a receptor, or a ligand for a receptor.

[0324] Aspect 25. A method of delivering a cargo RNA to a eukaryotic cell, the method comprising contacting the cell with the system of any one of aspects 1-24.

[0325] Aspect 26. A method of delivering an RNA-guided effector polypeptide/guide RNA ribonucleoprotein (RNP) to a eukaryotic cell, the method comprising contacting the cell with the system of any one of aspects 12-24.

[0326] Aspect 27. The method of aspect 25 or aspect 26, wherein the eukaryotic cell is in vitro.

[0327] Aspect 28. The method of aspect 25 or aspect 26, wherein the eukaryotic cell is in vivo in a human or non-human organism.

[0328] Aspect 29. The method of aspect 28, comprising administering the system to the organism.

[0329] Aspect 30. The method of any one of aspects 25-29, wherein the eukaryotic cell is selected from the group consisting of: a plant cell, a fungal cell, a single cell eukaryotic organism, a mammalian cell, a reptile cell, an insect cell, an avian cell, a fish cell, a parasite cell, an arthropod cell, a cell of an invertebrate, a cell of a vertebrate, a rodent cell, a mouse cell, a rat cell, a primate cell, a non-human primate cell, and a human cell.

[0330] Aspect 31. The method of aspect 29, wherein the organism is a human.

[0331] Aspect 32. The method of aspect 28, wherein the organism is a non-human organism.

[0332] Aspect 33. The method of aspect 32, wherein the non-human organism is selected from the group consisting of a plant, a fungus, a non-human mammal, an insect, a reptile, a bird, a fish, a parasite, an arthropod, an invertebrate, and a vertebrate.

[0333] Aspects, including embodiments, of the present subject matter described above may be beneficial alone or in combination, with one or more other aspects or embodiments. Without limiting the foregoing description, certain non-limiting aspects of the disclosure numbered 1-39 are provided below. As will be apparent to those of skill in the art upon reading this disclosure, each of the individually numbered aspects may be used or combined with any of the preceding or following individually numbered aspects. This is intended to provide support for all such combinations of aspects and is not limited to combinations of aspects explicitly provided below:

### ASPECTS B

[0334] Aspect 1. A system comprising:

[0335] a) a modified RNA-binding protein (RBP) comprising:
[0336] i) an RBP; and
[0337] ii) one or more endosomolytic peptides or cell penetrating peptides covalently linked, directly or via a linker, to the RBP; and

[0338] b) a modified cargo RNA complexed to the RBP, wherein the modified cargo RNA comprises a cargo RNA modified to include one or more RBP binding sites that are bound by the RBP present in the modified RBP.

[0339] Aspect 2. The system of aspect 1, wherein the RBP comprises an amino acid sequence having at least 85% amino acid sequence identity to the amino acid sequence of an RBP selected from an MS2 polypeptide, a U1A snRNP polypeptide, a PP7 viral coat polypeptide, a poly(A)-binding protein (PABP), a stem-loop binding polypeptide, a boxB polypeptide, a Csy4 polypeptide, a HuA polypeptide, a HuB polypeptide, a HuC polypeptide, a HuD polypeptide, an hnRNP polypeptide, a CArG polypeptide, or an eIF4A polypeptide.

[0340] Aspect 3. The system of aspect 1 or aspect 2, wherein the one or more endosomolytic peptides or cell penetrating peptides is activated at low pH.

[0341] Aspect 4. The system of any one of aspects 1-3, wherein the one or more endosomolytic peptides comprises an amino acid sequence selected from

(SEQ ID NO: 817)
GLFHALLHLLHSLWHLLLHA,
(SEQ ID NO: 818)
GLFEAIAEFIENGWEGLIEGWYGGRKKRRQRRR,
(SEQ ID NO: 819)
GPSQPTYPGDDAPVRDLIRFYRDLRRY,
(SEQ ID NO: 820)
WYSCNVCGKAFVLSRHLNRHLRVHRRAT
and
(SEQ ID NO: 821)
HHEHHEHHEHHEHHEHHEHHEHHEHHE.

[0342] Aspect 5. The system of any one of aspects 1-4, wherein the RBP of the modified RBP is linked to the endosomolytic peptide or the cell penetrating peptide via a cleavable linker.

[0343] Aspect 6. The system of aspect 5, wherein the cleavable linker is an enzyme-cleavable linker, an acid-cleavable linker, or a redox-cleavable linker.

[0344] Aspect 7. The system of any one of aspects 1-6, wherein the modified RBP comprises 1 endosomolytic peptide.

[0345] Aspect 8. The system of any one of aspects 1-6, wherein the modified RBP comprises 2 endosomolytic peptides.

[0346] Aspect 9. The system of any one of aspects 1-6, wherein the modified RBP comprises 3 endosomolytic peptides.

[0347] Aspect 10. The system of any one of aspects 1-6, wherein the modified RBP comprises 4 endosomolytic peptides.

[0348] Aspect 11. The system of any one of aspects 1-10, wherein the cargo RNA comprises a binding site for a polypeptide other than the modified RBP.

[0349] Aspect 12. The system of any one of aspects 1-10, wherein the cargo RNA is a guide RNA comprising:

[0350] i) a targeting segment comprising a nucleotide sequence that hybridizes to a nucleotide sequence in a target nucleic acid; and

[0351] ii) an activation segment comprising a nucleotide sequence that binds to and activates an RNA-guided effector polypeptide.

[0352] Aspect 13. The system of aspect 12, comprising an RNA-guided effector polypeptide.

[0353] Aspect 14. The system of aspect 13, wherein the RNA-guided effector polypeptide is a class 2 CRISPR/Cas effector polypeptide.

[0354] Aspect 15. The system of aspect 14, wherein the class 2 CRISPR/Cas effector polypeptide is a type II CRISPR/Cas effector polypeptide.

[0355] Aspect 16. The system of aspect 14, wherein the class 2 CRISPR/Cas effector polypeptide is a Cas9 protein and the corresponding CRISPR/Cas guide RNA is a Cas9 guide RNA.

[0356] Aspect 17. The system of aspect 14, wherein the class 2 CRISPR/Cas effector polypeptide is a type V or type VI CRISPR/Cas effector polypeptide.

[0357] Aspect 18. The system of aspect 14, wherein the class 2 CRISPR/Cas effector polypeptide is a Cpf1 protein, a C2c1 protein, a C2c3 protein, or a C2c2 protein.

[0358] Aspect 19. The system of aspect 14, wherein the class 2 CRISPR/Cas effector polypeptide is a Cas12 protein.

[0359] Aspect 20. The system of aspect 14, wherein the class 2 CRISPR/Cas effector polypeptide is a Cas13 protein.

[0360] Aspect 21. The system of aspect 13, wherein the RNA-guided effector enzyme is a base editor.

[0361] Aspect 22. The system of any one of aspects 12-21, wherein the guide RNA comprises one or more nucleic acid modifications.

[0362] Aspect 23. The system of aspect 22, wherein the one or more nucleic acid modifications comprise one or more of a modified nucleobase, a modified backbone or non-natural internucleoside linkage, a modified sugar moiety, a Locked Nucleic Acid, and a Peptide Nucleic acid.

[0363] Aspect 24. The system of any one of aspects 13-23, wherein the RNA-guided effector enzyme comprises a targeting moiety covalently linked to the RNA-guided effector enzyme.

[0364] Aspect 25. The system of aspect 24, wherein the targeting moiety is an antibody, a ligand-binding portion of a receptor, or a ligand for a receptor.

[0365] Aspect 26. A method of delivering a cargo RNA to a eukaryotic cell, the method comprising contacting the cell with the system of any one of aspects 1-25.

[0366] Aspect 27. A method of delivering an RNA-guided effector polypeptide/guide RNA ribonucleoprotein (RNP) to a eukaryotic cell, the method comprising contacting the cell with the system of any one of aspects 13-25.

[0367] Aspect 28. The method of aspect 26 or aspect 27, wherein the eukaryotic cell is in vitro.

[0368] Aspect 29. The method of aspect 26 or aspect 27, wherein the eukaryotic cell is in vivo in a human or non-human organism.

[0369] Aspect 30. The method of aspect 29, comprising administering the system to the organism.

[0370] Aspect 31. The method of any one of aspects 26-30, wherein the eukaryotic cell is selected from the group consisting of: a plant cell, a fungal cell, a single cell eukaryotic organism, a mammalian cell, a reptile cell, an insect cell, an avian cell, a fish cell, a parasite cell, an arthropod cell, a cell of an invertebrate, a cell of a vertebrate, a rodent cell, a mouse cell, a rat cell, a primate cell, a non-human primate cell, and a human cell.

[0371] Aspect 32. The method of aspect 30, wherein the organism is a human.

[0372] Aspect 33. The method of aspect 29, wherein the organism is a non-human organism.

[0373] Aspect 34. The method of aspect 33, wherein the non-human organism is selected from the group consisting of a plant, a fungus, a non-human mammal, an insect, a reptile, a bird, a fish, a parasite, an arthropod, an invertebrate, and a vertebrate.

[0374] Aspect 35. The system of any one of aspects 1-3, wherein the modified RBP comprises 1 cell penetrating peptide.

[0375] Aspect 36. The system of any one of aspects 1-3, wherein the modified RBP comprises 2 cell penetrating peptides.

[0376] Aspect 37. The system of any one of aspects 1-3, wherein the modified RBP comprises 3 cell penetrating peptides.

[0377] Aspect 38. The system of any one of aspects 1-3, wherein the modified RBP comprises 4 cell penetrating peptides.

[0378] Aspect 39. The system of any one of aspects 1-3, wherein the one or more cell penetrating peptides comprises an amino acid sequence selected from

(SEQ ID NO: 885)
GRKKRRQRRRPPQ,
(SEQ ID NO: 886)
RQIKIWFQNRRMKWKK,
(SEQ ID NO: 887)
RRIPNRRPRR,
(SEQ ID NO: 888)
RLRWR,
(SEQ ID NO: 889)
GALFLGFLGAAGSTMGAWSQPKKKRKV,
(SEQ ID NO: 890)
KETWWETWWTEWSQPKKRKV,
(SEQ ID NO: 891)
MVRRFLVTLRIRRACGPPRVRV,
(SEQ ID NO: 892)
LLIILRRRIRKQAHAHSK,
(SEQ ID NO: 893)
GWTLNSAGYLLGKINLKALAALAKKIL,
(SEQ ID NO: 894)
QLALQLALQALQAALQLA,
(SEQ ID NO: 895)
DPKGDPKGVTVTVTVTVTGKGDPKPD,
(SEQ ID NO: 896)
RRIRPRPPRLPRPRPRPLPFPRPG,
(SEQ ID NO: 897)
NH₂-HGLASTLTRWAHYNALIRAF-CONH₂,
and
(SEQ ID NO: 898)
WEAALAEALAEALAEHLAEALAEALEALAA.

[0379] Aspects, including embodiments, of the present subject matter described above may be beneficial alone or in combination, with one or more other aspects or embodiments. Without limiting the foregoing description, certain non-limiting aspects of the disclosure numbered 1-5 are provided below. As will be apparent to those of skill in the art upon reading this disclosure, each of the individually numbered aspects may be used or combined with any of the preceding or following individually numbered aspects. This is intended to provide support for all such combinations of aspects and is not limited to combinations of aspects explicitly provided below:

### ASPECTS C

[0380] Aspect 1. A system of the formula: A (X-(L-Z)ₙ)ₘ,

[0381] wherein:

[0382] i) A is a cargo RNA modified to include one or more binding sites for complexing to one or more modified RNA-binding proteins (RBPs) represented by (X-(L-Z)ₙ)ₘ;

[0383] ii) X is an RBP;

[0384] iii) L is an optional linking group;

[0385] iv) Z is an endosomolytic polypeptide (ELP); and

[0386] wherein n and m are each independently an integer from 1 to 10.

[0387] Aspect 2. The system of Aspect 1, wherein cargo RNA A comprises 1, 2, 3, 4, 5, 6, 7, 8, 9, or 10 binding sites for binding the modified RBP.

[0388] Aspect 3. The system of Aspect 1 or Aspect 2, wherein the RBP comprises an amino acid sequence having at least 85% amino acid sequence identity to the amino acid sequence of an RBP selected from an MS2 polypeptide, a U1A snRNP polypeptide, a PP7 viral coat polypeptide, a poly(A)-binding protein (PABP), a stem-loop binding polypeptide, a boxB polypeptide, a Csy4 polypeptide, a HuA polypeptide, a HuB polypeptide, a HuC polypeptide, a HuD polypeptide, an hnRNP polypeptide, a CArG polypeptide, or an eIF4A polypeptide.

[0389] Aspect 4. The system of any one of Aspects 1-3, wherein the ELP comprises an amino acid sequence selected from

(SEQ ID NO: 817)
GLFHALLHLLHSLWHLLLHA,
(SEQ ID NO: 818)
GLFEAIAEFIENGWEGLIEGWYGGRKKRRQRRR,
(SEQ ID NO: 819)
GPSQPTYPGDDAPVRDLIRFYRDLRRY,
(SEQ ID NO: 820)
WYSCNVCGKAFVLSRHLNRHLRVHRRAT
and
(SEQ ID NO: 821)
HHEHHEHHEHHEHHEHHEHHEHHEHHE.

[0390] Aspect 5. The system of any one of Aspects 1-4, wherein the cargo RNA is a guide RNA comprising:

[0391] i) a targeting segment comprising a nucleotide sequence that hybridizes to a nucleotide sequence in a target nucleic acid; and

[0392] ii) an activation segment comprising a nucleotide sequence that binds to and activates an RNA-guided effector polypeptide.

### EXAMPLES

[0393] The following examples are put forth so as to provide those of ordinary skill in the art with a complete disclosure and description of how to make and use the present invention, and are not intended to limit the scope of what the inventors regard as their invention nor are they intended to represent that the experiments below are all or the only experiments performed. Efforts have been made to ensure accuracy with respect to numbers used (e.g. amounts, temperature, etc.) but some experimental errors and deviations should be accounted for. Unless indicated otherwise, parts are parts by weight, molecular weight is weight average molecular weight, temperature is in degrees Celsius, and pressure is at or near atmospheric. Standard abbreviations may be used, e.g., bp, base pair(s); kb, kilobase(s); pl, picoliter(s); s or sec, second(s); min, minute(s); h or hr, hour(s); aa, amino acid(s); kb, kilobase(s); bp, base pair(s); nt, nucleotide(s); i.m., intramuscular(ly); i.p., intraperitoneal(ly); s.c., subcutaneous(ly); and the like.

### Example 1: Preparation of Modified ppTG21

[0394] The ppTG21 peptide (see e.g. Rittner et al, Mol Ther (2002) 5:104-14) was synthetically modified to include a C-terminal cysteine residue having a pyridyl disulfide leaving group to facilitate conjugation to a cysteine bearing U1A RBP. The modified ppTG21 peptide has the following sequence:

[0395] GLFHALLHLLHSLWHLLLHA (C) [pyridyl disulfide] (SEQ ID NO: 817).

### Example 2: Preparation of U1A Construct

[0396] The N-terminal RNA-binding domain of human U1A has been modified to include two mutations that improve stability. The Y31 residue was mutated to an H residue and the Q36 residue was mutated to an R residue as described in Oubridge et al, Nature. 1994 Dec. 1; 372(6505):432-8, and as shown below in SEQ ID NO: 848 (mutated residues emphasized):

(SEQ ID NO: 848)
MAVPETRPNHTIYINNLNEKIKKDELKKSLHAIFSRFGQILDILVSRSLK
MRGQAFVIFKEVSSATNALRSMQGFPFYDKPMRIQYAKTDSDIIAKMK

[0397] Three mutations were introduced into the U1A plasmid via site-directed mutagenesis to introduce cysteine residues as follows (SEQ ID NO: 823, SEQ ID NO:824, and SEQ ID NO:825):

1 Cys: S71C
2 Cys: S35C, S71C
3 Cys: S35C, S63C, S71C
(SEQ ID NO: 823)
MAVPETRPNHTIYINNLNEKIKKDELKKSLHAIFSRFGQILDILVSRSLK
MRGQAFVIFKEVSSATNALRCMQGFPFYDKPMRIQYAKTDSDIIAKMK
(SEQ ID NO: 824)
MAVPETRPNHTIYINNLNEKIKKDELKKSLHAIFCRFGQILDILVSRSLK
MRGQAFVIFKEVSSATNALRCMQGFPFYDKPMRIQYAKTDSDIIAKMK
(SEQ ID NO: 825)
MAVPETRPNHTIYINNLNEKIKKDELKKSLHAIFCRFGQILDILVSRSLK
MRGQAFVIFKEVCSATNALRCMQGFPFYDKPMRIQYAKTDSDIIAKMK

[0398] The three sites of cysteine mutations were on the opposite face of the U1A protein from the RNA-binding site. It has been demonstrated that the U1A protein interacts with RNAs primarily through two RNP motifs (termed RNP1 and RNP2 at the approximate positions 51-59 and 11-17, respectively) and that these two motifs align on one face of the U1A-RNA complex. Positions 35, 63 and 71 appear to face away from the U1A-RNA interface based on the available structural information.

### Example 3: Preparation of the U1A Protein and Conjugation of the ppTG21 ELP Peptides

[0399] The modified U1A proteins from Example 2 were used to facilitate attachment of the modified ppTG21 ELP peptides to the U1A protein. The U1A protein and its variants were expressed in purified using a protocol adapted from Ferré D'Amarè et al. (Nature 1998 Oct. 8; 395(6702):567-74). Briefly, following transformation using the plasmid encoding the appropriate U1A plasmid, the U1A protein was recombinantly expressed in E. coli BL21 grown at 37° C. in LB broth supplemented with 100 μg/mL ampicillin. After using starter cultures to inoculate 1 L cultures to O.D.₆₀₀≈0.05, the 1 L cultures were grown to O.D.₆₀₀ 0.6-1.0 and expression was induced by addition of 0.5 mM IPTG. Cells were harvested via centrifugation and resuspended in a buffer consisting of 20 mM Tris, pH 7.4, 500 mM NaCl, 10% Glycerol, and 1 mM TCEP. Following clarification of lysate via centrifugation at 30 k×g for 30′, the U1A variant was purified from the soluble fraction via ammonium sulfate precipitation. Contaminating proteins were removed by centrifugation at 35% ammonium sulfate; U1A variant was isolated by centrifugation at 75% ammonium sulfate. The 75% ammonium sulfate pellet containing U1A variant was resuspended in a buffer consisting of 20 mM HEPES, pH 7.5, 100 mM KCl, 10% Glycerol, 0.5 mM EDTA, and 1 mM TCEP, and dialyzed overnight at 4° C. into an appropriately large volume of the same buffer using 3 kDa MWCO membrane. A 5 mL SP HP column was used to purify the U1A via ion exchange. Ion exchange buffers containing 20 mM HEPES, pH 7.5, 10% Glycerol, 0.5 mM EDTA, and 1 mM TCEP, with the low-salt and high-salt buffers additionally containing 100 mM KCl or 1 M KCl, respectively. The peak resulting from the gradient elution of the ion exchange column was further purified via gel filtration using a 16/60 HiLoad Superdex 75 column with isocratic elution using a buffer consisting of 20 mM HEPES, pH 7.5, 100 mM NaCl (or KCl), 10% Glycerol, 0.5 mM EDTA, and 1 mM TCEP. Pure U1A variant was concentrated (or diluted) to 200 μM, flash-frozen, and stored at −20° C. or −80° C. until use.

[0400] The different U1A variants, comprising one, two or three introduced cysteines from Example 2 (SEQ ID NO:s 823, 824 and 825, respectively) were conjugated with modified ppTG21 to obtain U1A-ppTG21 conjugates. To perform a conjugation between a U1A variant and the modified ppTG21 ELP functionalized with a pyridyl-disulfide leaving group, the U1A variant was first desalted using a spin column (e.g. Zeba) to remove the reducing agent in which it was stored. After preparation of the modified ppTG21 powder into a 5 mM stock in DMSO, the U1A variant was mixed with 10 molar equivalents of modified ppTG21 in a buffer ultimately consisting of 20 mM HEPES, pH 7.5, 100 mM NaCl, 10% Glycerol, and 10% DMSO. Conjugation reactions were allowed to proceed ≥12 hours at room temperature. To purify the U1A-ppTG21 conjugates, the sample was centrifuged at 15 k×g for 10′ and the supernatant (containing unconjugated U1A variant and disulfide dimers thereof) was discarded. The resulting gel-like pellet was resuspended in a buffer consisting of 20 mM sodium acetate pH 4.0, 100 mM KCl, and 0.5 mM EDTA. The sample was centrifuged at 15 k×g for 10′, the pellet containing unconjugated modified ppTG21 was discarded, and the supernatant (containing U1A-ppTG21 conjugate) was retained. Conjugation of the ELP to the U1A was then verified by SDS-PAGE (FIG. 8) and intact protein mass spectrometry (FIG. 9). Mass spectrometry results are consistent with intracellular post-translational removal of the N-terminal methionine residue from the U1A variants.

[0401] FIG. 8 depicts an SDS-PAGE showing the mobility of U1A and its derivatives that have been conjugated with the pyridyl disulfide-functionalized variant of the ppTG21 peptide. The “no Cys U1A” sample (lane 1) does not have any cysteine residues. Lane 2 shows the 1-Cys U1A sample comprising one cysteine. Lane 3 shows the 2-Cys U1A sample comprising 2 cysteines, and Lane 4 shows the 3-Cys U1A sample comprising 3 cysteines. Shown on the sides of the gel are the locations of the unconjugated, monoconjugated, bisconjugated and trisconjugated U1A derivatives, and demonstrates that the no Cys U1A was not conjugated while the 1-Cys U1A was monoconjugated, the 2-Cys U1A was bisconjugated and the 3-Cys U1A was trisconjugated. Apparent also in the gel are higher molecular weight species from U1A complexes formed from the dimerization of the U1A proteins through disulfide bonds at the introduced cysteine residues.

[0402] FIG. 9 depicts a trace from mass spectrometry analysis of the U1A variants shown above, wherein the variants are conjugated with one, two or three chains of ppTG21. The anticipated mass for 1-Cys U1A monoconjugated to a single ppTG21 moiety is 13649.2 Da. The anticipated mass for 2-Cys U1A bisconjugated to two ppTG21 moieties is 16108.2 Da. The anticipated mass for 3-Cys U1A trisconjugated to three ppTG21 moieties is 18567.3 Da. The trace demonstrates that the modified U1A variants display the expected masses. This figure contains overlaid data from three separate and independent mass spectrometry runs.

### Example 4: Production of Guide RNA

[0403] Guide RNAs targeting EMX1 (using the same spacer sequence established in Lin et al. (Elife. 2014 Dec. 15; 3:e04766. doi: 10.7554/eLife.04766.)) were produced by in vitro transcription from a template featuring ribozymes flanking the genetic code of the sgRNA (FIG. 10A), as described in Rouet et al. (Rouet et al. J Am Chem Soc 140(21):6596-6603). Transcripts were analyzed by SDS-PAGE stained with SYBR Gold (FIG. 10B). The desired sgRNA transcripts were purified away from other species via preparative denaturing urea PAGE followed by UV shadowing and passive elution. Purity and integrity of the synthesized guide RNA was demonstrated by mass spectrometry (FIG. 11A-FIG. 11B).

[0404] Guide RNAs were also prepared to comprise one, two or three introduced stem loops (SL) to serve as U1A binding sites. These sgRNAs were constructed by combining sequence elements described above. The additional stem loops were introduced into the IVT template synthetically prior to the in vitro transcription. The resulting sgRNA sequences are named as follows:

“noSL”:
(SEQ ID NO: 918)
[spacer]GUUUAAGAGCUAUGCUGGAAACAGCAUAGCAAGUUUAAAUAA
GGCUAGUCCGUUAUCAACUUGAAAAAGUGGCACCGAGUCGGUGCUUUUUU
U.
“SLa”:
(SEQ ID NO: 870)
[spacer]GUUUAAGAGCUAUGGAUCAUUGCACUCCGAUCCAUAGCAAGU
UUAAAUAAGGCUAGUCCGUUAUCAACUUGAAAAAGUGGCACCGAGUCGGU
GCUUUUUUU.
“SLb”:
(SEQ ID NO: 871)
[spacer]GUUUAAGAGCUAUGCUGGAAACAGCAUAGCAAGUUUAAAUAA
GGCUAGUCCGUUAUCAACUUGCAAUCCAUUGCACUCCGGAUUGCAAGUGG
CACCGAGUCGGUGCUUUUUUU.
“SLc”:
(SEQ ID NO: 872)
[spacer]GUUUAAGAGCUAUGCUGGAAACAGCAUAGCAAGUUUAAAUAA
GGCUAGUCCGUUAUCAACUUGAAAAAGUGGCACCGAGUCGGUGCAUCAUC
GCGCUGCAUUGCACUCCGCAGCGCUUUUUUU.
“SLab”:
(SEQ ID NO: 919)
[spacer]GUUUAAGAGCUAUGGAUCAUUGCACUCCGAUCCAUAGCAAGU
UUAAAUAAGGCUAGUCCGUUAUCAACUUGCAAUCCAUUGCACUCCGGAUU
GCAAGUGGCACCGAGUCGGUGCUUUUUUU.
“SLac”:
(SEQ ID NO: 920)
GUUUAAGAGCUAUGGAUCAUUGCACUCCGAUCCAUAGCAAGUUUAAAUAA
GGCUAGUCCGUUAUCAACUUGAAAAAGUGGCACCGAGUCGGUGCAUCAUC
GCGCUGCAUUGCACUCCGCAGCGCUUUUUUU.
“SLbc”:
(SEQ ID NO: 921)
[spacer]GUUUAAGAGCUAUGCUGGAAACAGCAUAGCAAGUUUAAAUAA
GGCUAGUCCGUUAUCAACUUGCAAUCCAUUGCACUCCGGAUUGCAAGUGG
CACCGAGUCGGUGCAUCAUCGCGCUGCAUUGCACUCCGCAGCGCUUUUUU
U.
“SLabc”:
(SEQ ID NO: 922)
[spacer]GUUUAAGAGCUAUGGAUCAUUGCACUCCGAUCCAUAGCAAGU
UUAAAUAAGGCUAGUCCGUUAUCAACUUGCAAUCCAUUGCACUCCGGAUU
GCAAGUGGCACCGAGUCGGUGCAUCAUCGCGCUGCAUUGCACUCCGCAGC
GCUUUUUUU.
“SLaa”:
(SEQ ID NO: 873)
[spacer]GUUUAAGAGCUAUGCGAGGCUAAGUCGCAUUGCACUCCGCGA
CAGCACAAGCCCGCUGCCAUUGCACUCCGGCAGCAGGGAACUCGCAUAGC
AAGUUUAAAUAAGGCUAGUCCGUUAUCAACUUGAAAAAGUGGCACCGAGU
CGGUGCUUUUUUU.
“SLbb”:
(SEQ ID NO: 874)
[spacer]GUUUAAGAGCUAUGCUGGAAACAGCAUAGCAAGUUUAAAUAA
GGCUAGUCCGUUAUCAACUUGCGAGGCUAAGUCGCAUUGCACUCCGCGAC
AGCACAAGCCCGCUGCCAUUGCACUCCGGCAGCAGGGAACUCGCAAGUGG
CACCGAGUCGGUGCUUUUUUU.
“SLbub”:
(SEQ ID NO: 923)
[spacer]GUUUAAGAGCUAUGCUGGAAACAGCAUAGCAAGUUUAAAUAA
GGCUAGUCCGUUAUCAACUUGUCGAGGCUAAGUCGCAUUGCACUCCGCGA
CAGCACAAGCCCGCUGCCAUUGCACUCCGGCAGCAGGGAACUCGUCAAGU
GGCACCGAGUCGGUGCUUUUUUU.
“SLaab”:
(SEQ ID NO: 924)
[spacer]GUUUAAGAGCUAUGCGAGGCUAAGUCGCAUUGCACUCCGCGA
CAGCACAAGCCCGCUGCCAUUGCACUCCGGCAGCAGGGAACUCGCAUAGC
AAGUUUAAAUAAGGCUAGUCCGUUAUCAACUUGCAAUCCAUUGCACUCCG
GAUUGCAAGUGGCACCGAGUCGGUGCUUUUUUU.
“SLabb”:
(SEQ ID NO: 925)
[spacer]GUUUAAGAGCUAUGGAUCAUUGCACUCCGAUCCAUAGCAAGU
UUAAAUAAGGCUAGUCCGUUAUCAACUUGCGAGGCUAAGUCGCAUUGCAC
UCCGCGACAGCACAAGCCCGCUGCCAUUGCACUCCGGCAGCAGGGAACUC
GCAAGUGGCACCGAGUCGGUGCUUUUUUU.
“SLabub”:
(SEQ ID NO: 926)
[spacer]GUUUAAGAGCUAUGGAUCAUUGCACUCCGAUCCAUAGCAAGU
UUAAAUAAGGCUAGUCCGUUAUCAACUUGUCGAGGCUAAGUCGCAUUGCA
CUCCGCGACAGCACAAGCCCGCUGCCAUUGCACUCCGGCAGCAGGGAACU
CGUCAAGUGGCACCGAGUCGGUGCUUUUUUU.

[0405] Note that the designation “noSL RNP” refers to the use of the noSL sgRNA formed into an RNP complex with Cas9 protein. The designation “[spacer]” refers to the variable, targeting region of the sgRNA variant to be synthesized. In the Examples presented herein, this region consists of 20 nt, although this need not be the case.

[0406] FIGS. 10A-10B depict the strategy and results for guide RNA production. FIG. 10A is a schematic representing the dual-ribozyme approach employed with in vitro transcription (IVT) to synthesize high-quality, high-purity single guide RNAs of lengths that are difficult to obtain via solid-state synthesis (Rouet et al. J Am Chem Soc 140(21):6596-6603). FIG. 10B depicts an analytical denaturing 4-20% polyacrylamide urea-PAGE gel revealing the products of various guide RNA IVT reactions bearing stem loop modifications at different positions of the sgRNA scaffold. Arrows on the right side of the gel indicate the identity of each major species present in the sample. The sgRNA variant samples vary in size from 111 nt to 143 nt. As described in (Rouet, ibid), a preparative denaturing PAGE gel allowed the guide RNA bands to be cut out and eluted, and provided pure guide RNA that was free of contaminating ribozymes or any other RNA species.

[0407] FIGS. 11A-11B depict mass spectrometry traces of the guide RNAs. FIG. 11A shows a Denaturing Urea PAGE gel (inset) and mass spectrometry result demonstrating purity and integrity of IVT-synthesized unmodified guide RNA noSL (expected molecular weight of 36,390 Da) targeting the EMX1 gene (spacer sequence GUCACCUCCAAUGACUAGGG (SEQ ID NO:917)). Artifactual peaks with larger apparent molecular weights than 36,390 Da resulted from salt adducts, and were not indicative of covalent modification of the guide RNA. FIG. 11B is a mass spectrometry trace demonstrating the purify purity and integrity of IVT-synthesized guide RNA (SLabub) that was engineered to bind U1A at three sites and is targeting the EMX1 gene (spacer sequence GUCACCUCCAAUGACUAGGG (SEQ ID NO:917)).

### Example 5: Binding of Conjugated ELP-U1A Variants to Guide RNAs or RNP

[0408] Cas9 was purified as described in Rouet et al. (ibid). The purified Cas9 (with or without conjugation by ASGPr ligand) was mixed with a variant guide RNA (i.e., a guide RNA with or without one or more SL, as described above), as described in Rouet et al. (ibid). Briefly, Cas9 protein was diluted to the desired concentration (25 μM, 12 μM, or 10 μM) with a final magnesium chloride concentration of 1 mM. The sgRNA was prepared in a buffer without magnesium chloride and refolded by heating to 95° C. followed by rapid cooling to 5° C. The prepared Cas9 solution was added to the prepared solution of sgRNA at the desired concentration (30 μM, 14.4 μM, or 12 μM) in a 1:1.2 Cas9:RNA molar ratio and the resulting solution was incubated at 37° C. for 10 min. The resulting RNP was cooled to room temperature and was either used immediately or frozen at −80° C. for later use. Guides or RNP were used to test their capacity to be bound by U1A variants and U1A-ppTG21 conjugates by fluorescence polarization binding assays using the experimental design described in Hochstrasser et al. Mol Cell. 2016 Sep. 1; 63(5):840-51. doi: 10.1016/j.molcel.2016.07.027. In these experiments, the guides comprising a single stem loop (SLa and SLb), or three stem loops (SLabc) were compared with guides lacking any introduced stem loop (noSL). The results (FIGS. 12A-12B) demonstrate that the addition of the stem loops resulted in an increase in affinity for the U1A adapter protein, in two contexts: sgRNA alone or sgRNA complexed with Cas9 to form an RNP. Another set of experiments compared the same properties of the SLb and SLabub sgRNA configurations, either as sgRNA alone or as sgRNA complexed with Cas9 to form an RNP. The results (FIGS. 13A-13B) demonstrated that the binding of the U1A variants was increased in the presence of the stem loops.

[0409] Biolayer interferometry (BLI) was used to assess the capacity of Cas9 RNPs containing sgRNA variants to bind U1A (or U1A-ppTG21 conjugates) as well as to assess the persistence of any binding events. These assays approximated the experimental design described in Richardson et al. (Nat Biotechnol. 2016 March; 34(3):339-44. doi: 10.1038/nbt.3481). These experiments relied on a Cas9 protein covalently, site-specifically labeled with a biotin moiety, allowing loading onto a BLI sensor bearing streptavidin. The instrument used was an Octet Red 384. The buffer used was 20 mM HEPES, pH 7.5, 100 mM KCl, 10% Glycerol, 0.01 mg/ml Heparin, 0.01% IGEPAL. The loading step of the experiment used Cas9 RNP at 20 nM in the wells. U1A wells contained 100 nM, 330 nM, or 1 μM U1A. An experiment with noSL RNP immobilized on the sensor demonstrated a lack of substantial U1A binding to the Cas9 RNP (FIG. 14). In contrast to the noSL RNP experiment, the SLabub RNP was markedly bound by the U1A, and the binding persisted for the ˜2000 s (˜33 min) duration of the dissociation phase (FIG. 15A). The SLabub RNP experiment was repeated using U1A-ppTG21 conjugate in the wells at concentrations spanning 100 nM to 6 μM (FIG. 15B). Pronounced binding was observed at all concentrations, and persisting binding was observed over the ˜900 s (˜15 min) duration of the dissociation phase.

[0410] To ensure that the binding observed was specific to the interfacial RNA nucleotides (GCACUC) (SEQ ID NO:929) known to be recognized by U1A, additional BLI experiments were performed comparing two different RNA sequences: the canonical U1 RNA stem loop 2 (AAUCCAUUGCACUCCGGAUU, SEQ ID NO:927) and the negative-control U2 stem loop (AAUCCAUUCAUGUACCGGAUU, SEQ ID NO:928) known to exhibit no specific binding by U1A (see e.g. Scherly et al, Nature (1990) 345(6275:502-506). Both RNA sequences were synthesized with a 5′ biotin modification to facilitate loading onto a BLI sensor bearing streptavidin. The loading step of this experiment contained 40 nM of the desired RNA stem loop in the wells. The concentrations of U1A-ppTG21 conjugate in the wells covered the range of 0.33-333 nM. Substantial binding was observed between the U1 stem loop and the U1A-ppTG21 conjugate, and this binding persisted for the ˜2000 s (˜33 min) of the dissociation phase (FIG. 15C). In contrast, the U2 stem loop was not substantially bound by the U1A-ppTG21 conjugate (FIG. 15D).

[0411] FIGS. 12A-12B are graphs from fluorescence polarization (FP) binding assays. These tested for affinity between adaptor protein U1A and different guide RNA constructs. FP assays were performed using 1-Cys U1A monoconjugated with maleimide-functionalized fluorescein present at 10 nM and specified guide RNAs or RNPs were present at the shown concentration values. The sgRNAs were prepared via dual-ribozyme in vitro transcription as described above in FIGS. 10A-10B. FIG. 12A shows an FP assay detecting binding between U1A and guide RNA constructs: noSL is the unmodified guide with no binding sites for U1A; SLa, SLb, and SLc each contain a single binding site for U1A; SLabc contains three binding sites for U1A. Curve fitting provides approximate binding affinities: 8.3 nM for U1A:SLa binding; 8.8 nM for U1A:SLb binding; 10.4 nM for U1A:SLc binding; 0.9 nM for U1A:SLabc binding. FIG. 12B shows an FP assay detecting binding between U1A and Cas9-sgRNA (RNP) complexes. The same four guide RNAs described in (a) were assembled into RNP complexes as described in (Rouet, ibid). Curve fitting provided approximate binding affinities: 15.8 nM for U1A:SLa-RNP binding; 14.3 nM for U1A:SLb-RNP binding; 13.8 nM for U1A:SLc-RNP binding; 3.6 nM for U1A:SLabc-RNP binding.

[0412] FIGS. 13A-13B are graphs from FP binding assays testing for affinity between adaptor protein U1A and different guide RNA constructs. FP assays were performed as in FIG. 12, but with different guide RNAs. 1-Cys U1A monoconjugated with maleimide-functionalized fluorescein was present at 10 nM and specified guide RNAs or RNPs were present at the shown concentration values. FIG. 13A is an FP assay detecting binding between U1A and guide RNA constructs: noSL is the unmodified guide with no binding sites for U1A; SLb contains a single binding site for U1A; SLabub contains three binding sites for U1A. Curve fitting provides approximate binding affinities: 2.2 nM for U1A:SLb binding; 1.2 nM for U1A:SLabub binding. FIG. 13B is an FP assay detecting binding between U1A and Cas9-sgRNA (RNP) complexes. Curve fitting provides approximate binding affinities: 0.08 nM for U1A:SLb-RNP binding; 0.15 nM for U1A:SLabub-RNP binding.

[0413] FIGS. 15A-15D is a trace from a biolayer interferometry (BLI) results demonstrating persisting binding between U1A and a Cas9 RNP containing an engineered guide RNA bearing three binding sites for the U1A adaptor (noSL). The experiment relied on a Cas9 protein covalently labeled with a biotin, allowing loading onto a BLI sensor bearing streptavidin. The concentrations of U1A samples in the wells is indicated next to each curve in a corresponding shade of grey.

### Example 6: Genome Editing Using U1A Variants and Modified Guide RNAs

[0414] Genome editing was performed as described in Rouet et al. (ibid), in particular the genome editing relying on the 1NLS Cas9 construct with or without the ASGPr ligand, with the following changes throughout: non-coated plates were used instead of gelatin-coated plates; 50 pmol of RNP was added per 100,000 cells in each condition (e.g. 10 pmol per 20,000 cells in a 96-well plate format); after heteroduplex formation with 200 ng of genomic DNA extracted from the cells, the T7E1 assay was used for editing analysis with polyacrylamide gels (Novex TBE 4-20%) using SYBR Gold staining. Gels were imaged with a Gel Doc transilluminator (BioRad) and quantification was based on relative band intensities. Indel percentage was determined by the formula: 100×(1−(1−(b+c)/(a+b+c))¹¹², where a is the intensity of undigested PCR product, and b and c are the intensities of the cleaved products (see Guschin et al. (2010) in Engineered Zinc Finger Proteins, eds Mackay J P, Segal D J (Humana Press, Totowa, N.J.), pp 247-256). Cas9 RNP was prepared as in Example 5 and applied either alone, with addition of ppTG21, or with addition U1A-ppTG21 conjugates. Cas9 RNP mixtures were added to cells and returned to the incubator. Cells were harvested 44-48 h later, and genomic DNA was harvested. T7E1 analysis was performed as described in Rouet et al. (ibid).

[0415] An editing experiment utilized Cas9 conjugated with two copies of the ASGPr ligand, which is known to induce endocytosis of the conjugated Cas9 (when it has bound a sgRNA to form an RNP complex) into HepG2 cells, which bear the ASGP receptor (Rouet et al. (2018) J. Am. Chem. Soc. 140:6596). This experiment used ligand-bound Cas9 RNP and assessed the genome editing ability of different configurations of variant sgRNA (e.g. noSL, SLa, SLb, SLab, or SLabub, which bear 0, 1, 1, 2, or 3 binding sites for U1A, respectively) bound by different U1A-ppTG21 conjugates (e.g. U1A(1), U1A(2), or U1A(3), which respectively represent U1A monoconjugated, bisconjugated, or trisconjugated with ppTG21, as visualized in FIG. 4). For each condition containing U1A-ppTG21, 1.5 molar equivalents of U1A-ppTG21 were added per mole of U1A binding site on the corresponding variant sgRNA. SLa and SLb conditions contained 1.5 molar equivalents of U1A-ppTG21; SLab conditions contained 3 molar equivalents of U1A-ppTG21; SLabub conditions contained 4.5 molar equivalents of U1A-ppTG21; noSL RNP was supplemented with 1.5 molar equivalents of U1A-ppTG21. Genome editing targeted the EMX1 locus. The resulting genome editing rates revealed pronounced genome editing by the SLabub RNP constructs irrespective of the U1A-ppTG21 conjugate used, and increased editing in other RNP constructs (especially SLab) as the extent of ppTG21 conjugation increased (FIG. 4).

[0416] Another editing experiment was performed to assess the ability of the Cas9 RNP with adaptor-recruited ELPs (arELP) to perform ligand-enhanced (and thus, receptor-mediated) genome editing. This experiment compared Cas9 RNP without the ASGPr ligand to Cas9 RNP bisconjugated to the ASGPr ligand (FIGS. 16A-16E). Genome editing targeted the EMX1 locus. Positive (FIG. 16A) and negative (FIG. 16B) controls respectively established the maximal and background editing rates for these conditions. An experiment involving 30 molar equivalents of ppTG21 added to Cas9 RNP in trans approximated the ligand-mediated editing experiment of Rouet et al. (ibid) but with the present conditions and changes as noted above (FIG. 16C). An experiment combining SLabub RNP (either with or without ASGPr ligand) with a monoconjugated U1A-ppTG21 (the U1A variant bearing a single Cys, conjugated to a single moiety of ppTG21) reveals that this strategy is capable of promoting ligand-enhanced (and thus, receptor-mediated) genome editing (FIG. 16D). An additional control tests the editing activity of a noSL RNP (incapable of recruiting U1A-ppTG21) bisconjugated to the ASGPr ligand; no substantial genome editing is observed when the RNP is not capable of recruiting the U1A-ppTG21(FIG. 16E). SLabub conditions contained 4.5 molar equivalents of U1A-ppTG21; noSL RNP was supplemented with 1.5 molar equivalents of U1A-ppTG21.

[0417] FIG. 4 illustrates EMX1 editing results in HEPG2 cells, which were treated with a positive control for each RNP construct (“noSL” conditions), and RNPs containing various sgRNA designs capable of recruiting various numbers of U1A RBP adaptor molecules to their engineered U1A binding sites, wherein the U1A RBP adaptor molecules include 1, 2, or 3 covalently bound ELPs. The recruitment of more ELPs to the RNP surface, via U1A association, promotes drastically improved editing as compared to the “noSL” conditions, which represent an RNP that cannot recruit U1A (or its bound ELPs). In each grouping, the bars are as follows: left most bar: noSL; second to left bar: SLa; middle bar: SLb; second to right bar: SLab; right most bar: SLabub. Note that the predicted secondary stem loop structures of each of the RNAs is shown below the graph, indicating their identities. The legend shows how many U1A conjugates are expected to be bound to each RNP based on the number of U1A binding sites incorporated into each sgRNA variant: 0 for noSL; 1 for SLa or SLb; 2 for SLab; 3 for SLabub. To promote complete binding, each binding site was provided with 1.5 molar equivalents of U1A conjugate: 1.5 equivalents per SLa or SLb RNP; 3 equivalents per SLab RNP; 4.5 equivalents per SLabub RNP. The noSL RNP condition included 4.5 molar equivalents—the highest number of molar equivalents; the intention was to test for editing activity that does not depend on specific association between U1A conjugate and the U1A binding sites incorporated into the “SLx” sgRNA variants. The leftmost “CPP” lanes represent a positive control for genome editing facilitated by 30 molar equivalents of a commercially available cell-penetrating peptide.

[0418] FIG. 14 is a trace from a biolayer interferometry (BLI) experiment, and demonstrated the absence of substantial binding between U1A and a Cas9 RNP containing an unmodified guide RNA (noSL). The experiment relied on a Cas9 protein covalently labeled with a biotin, allowing loading onto a BLI sensor bearing streptavidin. The concentrations of U1A samples in the wells is indicated next to each curve in a corresponding shade of grey.

[0419] FIGS. 16A-16E is a graph demonstrating receptor-mediated genome editing of the EMX1 gene via adaptor-recruited endosomolytic peptides (arELP) bound to Cas9 RNP. Gels were imaged with a Gel Doc transilluminator (BioRad) and quantification was based on relative band intensities. Detection of insertions and deletions in the edited target (“indels”) caused by error prone non-homologous end-joining follow cleavage was used as a measure of editing efficiency. Indel percentage was determined by the formula: 100×(1-(1-(b+c)/(a+b+c))½, where a is the intensity of undigested PCR product, and b and c are the intensities of the cleaved products. Experiments were performed either without (unfilled/white bars) or with (filled bars) bisconjugation of the asialogycoprotein ligand (ASGPrL, ligand) to the Cas9 protein component as described in (Rouet, ibid). Shown below the graph are schematics depicting the RNP complexes. Group A shows Cas9 RNP containing unmodified sgRNA, with or without ligand and electroporated into cells. Group B shows the results from Cas9 RNP containing unmodified sgRNA, with or without ligand, incubated with cells in the absence of any endosomolytic reagent. Group C shows the results from Cas9 RNP containing unmodified sgRNA, with or without ligand, in the presence of 30 molar equivalents (1500 pmol) of the endosomolytic peptide (ELP) ppTG21. Group D shows the results from Cas9 RNP containing sgRNA that had been modified to include three stem-loops (SLabub) to recruit adaptor-recruited endosomolytic peptides (arELP), using Cas9 protein with or without ligand, in the presence of 4.5 molar equivalents (270 pmol) of 1-Cys U1A adaptor protein monoconjugated to a pyridyl disulfide-functionalized variant of the ppTG21 peptide. Group E shows the results from Cas9 RNP containing unmodified sgRNA, with ligand, in the presence of 4.5 molar equivalents (270 pmol; 1.5 equivalents per U1A binding site in the sgRNA) of 1-Cys U1A adaptor protein monoconjugated to a pyridyl disulfide-functionalized variant of the ppTG21 peptide. In all groupings, white inlaid text on the data bar refers to the approximate fold enhancement provided by the presence of the ligand; an indicator of the receptor-mediated fidelity of the delivery strategy.

[0420] While the present invention has been described with reference to the specific embodiments thereof, it should be understood by those skilled in the art that various changes may be made and equivalents may be substituted without departing from the true spirit and scope of the invention. In addition, many modifications may be made to adapt a particular situation, material, composition of matter, process, process step or steps, to the objective, spirit and scope of the present invention. All such modifications are intended to be within the scope of the claims appended hereto.

What is claimed is:

1. A system comprising:
a) a modified RNA-binding protein (RBP) comprising:
i) an RBP; and
ii) one or more endosomolytic peptides or cell penetrating peptides covalently linked, directly or via a linker, to the RBP; and
b) a modified cargo RNA complexed to the RBP, wherein the modified cargo RNA comprises a cargo RNA modified to include one or more RBP binding sites that are bound by the RBP present in the modified RBP.

2. The system of claim 1, wherein the RBP comprises an amino acid sequence having at least 85% amino acid sequence identity to the amino acid sequence of an RBP selected from an MS2 polypeptide, a U1A snRNP polypeptide, a PP7 viral coat polypeptide, a poly(A)-binding protein (PABP), a stem-loop binding polypeptide, a boxB polypeptide, a Csy4 polypeptide, a HuA polypeptide, a HuB polypeptide, a HuC polypeptide, a HuD polypeptide, an hnRNP polypeptide, a CArG polypeptide, or an eIF4A polypeptide.

3. The system of claim 1 or claim 2, wherein the one or more endosomolytic peptides or cell penetrating peptides is activated at low pH.

4. The system of any one of claims 1-3, wherein the one or more endosomolytic peptides comprises an amino acid sequence selected from GLFHALLHLLHSLWHLLLHA (SEQ ID NO: 817), GLFEAIAEFIENGWEGLIEGWYGGRKKRRQRRR (SEQ ID NO: 818), GPSQPTYPGDDAPVRDLIRFYRDLRRY (SEQ ID NO: 819), WYSCNVCGKAFVLSRHLNRHLRVHRRAT (SEQ ID NO: 820) and HHEHHEHHEHHEHHEHHEHHEHHEHHE (SEQ ID NO: 821).

5. The system of any one of claims 1-4, wherein the RBP of the modified RBP is linked to the endosomolytic peptide or the cell penetrating peptide via a cleavable linker.

6. The system of claim 5, wherein the cleavable linker is an enzyme-cleavable linker, an acid-cleavable linker, or a redox-cleavable linker.

7. The system of any one of claims 1-6, wherein the modified RBP comprises 1 endosomolytic peptide.

8. The system of any one of claims 1-6, wherein the modified RBP comprises 2 endosomolytic peptides.

9. The system of any one of claims 1-6, wherein the modified RBP comprises 3 endosomolytic peptides.

10. The system of any one of claims 1-6, wherein the modified RBP comprises 4 endosomolytic peptides.

11. The system of any one of claims 1-10, wherein the cargo RNA comprises a binding site for a polypeptide other than the modified RBP.

12. The system of any one of claims 1-10, wherein the cargo RNA is a guide RNA comprising:
i) a targeting segment comprising a nucleotide sequence that hybridizes to a nucleotide sequence in a target nucleic acid; and
ii) an activation segment comprising a nucleotide sequence that binds to and activates an RNA-guided effector polypeptide.

13. The system of claim 12, comprising an RNA-guided effector polypeptide.

14. The system of claim 13, wherein the RNA-guided effector polypeptide is a class 2 CRISPR/Cas effector polypeptide.

15. The system of claim 14, wherein the class 2 CRISPR/Cas effector polypeptide is a type II CRISPR/Cas effector polypeptide.

16. The system of claim 14, wherein the class 2 CRISPR/Cas effector polypeptide is a Cas9 protein and the corresponding CRISPR/Cas guide RNA is a Cas9 guide RNA.

17. The system of claim 14, wherein the class 2 CRISPR/Cas effector polypeptide is a type V or type VI CRISPR/Cas effector polypeptide.

18. The system of claim 14, wherein the class 2 CRISPR/Cas effector polypeptide is a Cpf1 protein, a C2c1 protein, a C2c3 protein, or a C2c2 protein.

19. The system of claim 14, wherein the class 2 CRISPR/Cas effector polypeptide is a Cas12 protein.

20. The system of claim 14, wherein the class 2 CRISPR/Cas effector polypeptide is a Cas13 protein.

21. The system of claim 13, wherein the RNA-guided effector enzyme is a base editor.

22. The system of any one of claims 12-21, wherein the guide RNA comprises one or more nucleic acid modifications.

23. The system of claim 22, wherein the one or more nucleic acid modifications comprise one or more of a modified nucleobase, a modified backbone or non-natural internucleoside linkage, a modified sugar moiety, a Locked Nucleic Acid, and a Peptide Nucleic acid.

24. The system of any one of claims 13-23, wherein the RNA-guided effector enzyme comprises a targeting moiety covalently linked to the RNA-guided effector enzyme.

25. The system of claim 24, wherein the targeting moiety is an antibody, a ligand-binding portion of a receptor, or a ligand for a receptor.

26. A method of delivering a cargo RNA to a eukaryotic cell, the method comprising contacting the cell with the system of any one of claims 1-25.

27. A method of delivering an RNA-guided effector polypeptide/guide RNA ribonucleoprotein (RNP) to a eukaryotic cell, the method comprising contacting the cell with the system of any one of claims 13-25.

28. The method of claim 26 or claim 27, wherein the eukaryotic cell is in vitro.

29. The method of claim 26 or claim 27, wherein the eukaryotic cell is in vivo in a human or non-human organism.

30. The method of claim 29, comprising administering the system to the organism.

31. The method of any one of claims 26-30, wherein the eukaryotic cell is selected from the group consisting of: a plant cell, a fungal cell, a single cell eukaryotic organism, a mammalian cell, a reptile cell, an insect cell, an avian cell, a fish cell, a parasite cell, an arthropod cell, a cell of an invertebrate, a cell of a vertebrate, a rodent cell, a mouse cell, a rat cell, a primate cell, a non-human primate cell, and a human cell.

32. The method of claim 30, wherein the organism is a human.

33. The method of claim 29, wherein the organism is a non-human organism.

34. The method of claim 33, wherein the non-human organism is selected from the group consisting of a plant, a fungus, a non-human mammal, an insect, a reptile, a bird, a fish, a parasite, an arthropod, an invertebrate, and a vertebrate.

35. The system of any one of claims 1-3, wherein the modified RBP comprises 1 cell penetrating peptide.

36. The system of any one of claims 1-3, wherein the modified RBP comprises 2 cell penetrating peptides.

37. The system of any one of claims 1-3, wherein the modified RBP comprises 3 cell penetrating peptides.

38. The system of any one of claims 1-3, wherein the modified RBP comprises 4 cell penetrating peptides.

39. The system of any one of claims 1-3, wherein the one or more cell penetrating peptides comprises an amino acid sequence selected from
(SEQ ID NO: 885)
GRKKRRQRRRPPQ,
(SEQ ID NO: 886)
RQIKIWFQNRRMKWKK,
(SEQ ID NO: 887)
RRIPNRRPRR,
(SEQ ID NO: 888)
RLRWR,
(SEQ ID NO: 889)
GALFLGFLGAAGSTMGAWSQPKKKRKV,
(SEQ ID NO: 890)
KETWWETWWTEWSQPKKRKV,
(SEQ ID NO: 891)
MVRRFLVTLRIRRACGPPRVRV,
(SEQ ID NO: 892)
LLIILRRRIRKQAHAHSK,
(SEQ ID NO: 893)
GWTLNSAGYLLGKINLKALAALAKKIL,
(SEQ ID NO: 894)
QLALQLALQALQAALQLA,
(SEQ ID NO: 895)
DPKGDPKGVTVTVTVTVTGKGDPKPD,
(SEQ ID NO: 896)
RRIRPRPPRLPRPRPRPLPFPRPG,
(SEQ ID NO: 897)
NH₂-HGLASTLTRWAHYNALIRAF-CONH₂,
and
(SEQ ID NO: 898)
WEAALAEALAEALAEHLAEALAEALEALAA.

The application's sequence listing, which the Patent Office published only in electronic form, follows.

SEQUENCE LISTING (929 sequences)

SEQ ID NO: 1 - protein, 15 aa, Artificial sequence
  Synthetic sequence
IGLDIGTNSVGWAVI

SEQ ID NO: 2 - protein, 8 aa, Artificial sequence
  Synthetic sequence
IVIEMARE

SEQ ID NO: 3 - protein, 27 aa, Artificial sequence
  Synthetic sequence
DVDHIVPQSFLKDDSIDNKVLTRSDKN

SEQ ID NO: 4 - protein, 8 aa, Artificial sequence
  Synthetic sequence
HHAHDAYL

SEQ ID NO: 5 - protein, 1368 aa, Streptococcus pyogenes [sequence omitted]

SEQ ID NO: 6 - protein, 1367 aa, Streptococcus pyogenes
MDKKYSIGLDIGTNSVGWAVITDDYKVPSKKLKVLGNTDRHGIKKNLIGALLFDSGETAEATRLKRTARRRYTRRKNRICYLQEIFSNEMAKVDDSFFHRLEESFLVEEDKKHERHPIFGNIVDEVAYHEKYPTIYHLRKKLADSTDKVDLRLIYLALAHMIKFRGHFLIEGDLNPDNSDVDKLFIQLVQTYNQLFEENPINASRVDAKAILSARLSKSRRLENLIAQLPGEKKNGLFGNLIALSLGLTPNFKSNFDLAEDAKLQLSKDTYDDDLDNLLAQIGDQYADLFLAAKNLSDAILLSDILRVNSEITKAPLSASMIKRYDEHHQDLTLLKALVRQQLPEKYKEIFFDQSKNGYAGYIDGGASQEEFYKFIKPILEKMDGTEELLAKLNREDLLRKQRTFDNGSIPYQIHLGELHAILRRQEDFYPFLKDNREKIEKILTFRIPYYVGPLARGNSRFAWMTRKSEETITPWNFEEVVDKGASAQSFIERMTNFDKNLPNEKVLPKHSLLYEYFTVYNELTKVKYVTEGMRKPAFLSGEQKKAIVDLLFKTNRKVTVKQLKEDYFKKIECFDSVEISGVEDRFNTSLGTYHDLLKIIKDKDFLDNEENEDILEDIVLTLTLFEDKEMIEERLKKYANLFDDKVMKQLKRRHYTGWGRLSRKLINGIRDKQSGKTILDFLKSDGFANRNFMQLINDDSLTFKEAIQKAQVSGQGHSLHEQIANLAGSPAIKKGILQTVKIVDELVKVMGHKPENIVIEMARENQTTQKGQKNSRERMKRIEEGIKELGSQILKEHPVENTQLQNEKLYLYYLQNGRDMYVDQELDINRLSDYDVDHIVPQSFLKDDSIDNKVLTRSDKNRGKSDNVPSEEVVKKMKNYWRQLLNAKLITQRKFDNLTKAERGGLSELDKAGFIKRQLVETRQITKHVAQILDSRMNTKYDENDKLIREVKVITLKSKLVSDFRKDFQFYKVREINNYHHAHDAYLNAVVGTALIKKYPKLESEFVYGDYKVYDVRKMIAKSEQEIGKATAKYFFYSNIMNFFKTEITLANGEIRKRPLIETNGETGEIVWDKGRDFATVRKVLSMPQVNIVKKTEVQTGGFSKESILPKRNSDKLIARKKDWDPKKYGGFDSPTVAYSVLVVAKVEKGKSKKLKSVKELLGITIMERSSFEKNPIDFLEAKGYKEVRKDLIIKLPKYSLFELENGRKRMLASAGELQKGNELALPSKYVNFLYLASHYEKLKGSPEDNEQKQLFVEQHKHYLDEIIEQISEFSKRVILADANLDKVLSAYNKHRDKPIREQAKNIIHLFTLTNLGAPAAFKYFDTTIERNRYKSIKEVLDATLIHQSITGLYEIRIDLSQLGGD

SEQ ID NO: 7 - protein, 1056 aa, Pasteurella multocida
MQTTNLSYILGLDLGIASVGWAVVEINENEDPIGLIDVGVRIFERAEVPKTGESLALSRRLARSTRRLIRRRAHRLLLAKRFLKREGILSTIDLEKGLPNQAWELRVAGLERRLSAIEWGAVLLHLIKHRGYLSKRKNESQTNNKELGALLSGVAQNHQLLQSDDYRTPAELALKKFAKEEGHIRNQRGAYTHTFNRLDLLAELNLLFAQQHQFGNPHCKEHIQQYMTELLMWQKPALSGEAILKMLGKCTHEKNEFKAAKHTYSAERFVWLTKLNNLRILEDGAERALNEEERQLLINHPYEKSKLTYAQVRKLLGLSEQAIFKHLRYSKENAESATFMELKAWHAIRKALENQGLKDTWQDLAKKPDLLDEIGTAFSLYKTDEDIQQYLTNKVPNSVINALLVSLNFDKFIELSLKSLRKILPLMEQGKRYDQACREIYGHHYGEANQKTSQLLPAIPAQEIRNPVVLRTLSQARKVINAIIRQYGSPARVHIETGRELGKSFKERREIQKQQEDNRTKRESAVQKFKELFSDFSSEPKSKDILKFRLYEQQHGKCLYSGKEINIHRLNEKGYVEIDHALPFSRTWDDSFNNKVLVLASENQNKGNQTPYEWLQGKINSERWKNFVALVLGSQCSAAKKQRLLTQVIDDNKFIDRNLNDTRYIARFLSNYIQENLLLVGKNKKNVFTPNGQITALLRSRWGLIKARENNNRHHALDAIVVACATPSMQQKITRFIRFKEVHPYKIENRYEMVDQESGEIISPHFPEPWAYFRQEVNIRVFDNHPDTVLKEMLPDRPQANHQFVQPLFVSRAPTRKMSGQGHMETIKSAKRLAEGISVLRIPLTQLKPNLLENMVNKEREPALYAGLKARLAEFNQDPAKAFATPFYKQGGQQVKAIRVEQVQKSGVLVRENNGVADNASIVRTDVFIKNNKFFLVPIYTWQVAKGILPNKAIVAHKNEDEWEEMDEGAKFKFSLFPNDLVELKTKKEYFFGYYIGLDRATGNISLKEHDGEISKGKDGVYRVGVKLALSFEKYQVDELGKNRQICRPQQRQPVR

SEQ ID NO: 8 - protein, 1368 aa, Streptococcus pyogenes
MDKKYSIGLDIGTNSVGWAVITDDYKVPSKKLKGLGNTDRHGIKKNLIGALLFDSGETAEATRLKRTARRRYTRRKNRICYLQEIFSNEMAKVDDSFFHRLEESFLVEEDKKHERHPIFGNIVDEVAYHEKYPTIYHLRKKLADSTDKVDLRLIYLALAHMIKFRGHFLIEGDLNPDNSDVDKLFIQLVQTYNQLFEENPINASRVDAKAILSARLSKSRRLENLIAQLPGEKKNGLFGNLIALSLGLTPNFKSNFDLAEDAKLQLSKDTYDDDLDNLLAQIGDQYADLFLAAKNLSDATLLSDILRVNSEITKAPLSASMIKRYDEHHQDLTLLKALVRQQLPEKYKEIFFDQSKNGYAGYIDGGASQEEFYKFIKPILEKMDGTEELLAKLNREDLLRKQRTFDNGSIPYQIHLGELHAILRRQEDFYPFLKDNREKIEKILTFRIPYYVGPLARGNSRFAWMTRKSEETITPWNFEEVVDKGASAQSFIERMTNFDKNLPNEKVLPKHSLLYEYFTVYNELTKVKYVTEGMRKPAFLSGEQKKAIVDLLFKTNRKVTVKQLKEDYFKKIECFDSVEISGVEDRFNASLGTYHDLLKIIKDKDFLDNEENEDILEDIVLTLTLFEDREMIEERLKTYAHLFDDKVMKQLKRRRYTGWGRLSRKLINGIRDKQSGKTILDFLKSDGFANRNFMQLIHDDSLTFKEDIQKAQVSGQGDSLHEHIANLAGSPAIKKGILQTVKVVDELVKVMGRHKPENIVIEMARENQTTQKGQKNSRERMKRIEEGIKELGSDILKEYPVENTQLQNEKLYLYYLQNGRDMYVDQELDINRLSDYDVDHIVPQSFLKDDSIDNKVLTRSDKNRGKSDNVPSEEVVKKMKNYWRQLLNAKLITQRKFDNLTKAERGGLSELDKVGFIKRQLVETRQITKHVAQILDSRMNTKYDENDKLIREVRVITLKSKLVSDFRKDFQFYKVREINNYHHAHDAYLNAVVGTALIKKYPKLESEFVYGDYKVYDVRKMIAKSEQEIGKATAKYFFYSNIMNFFKTEITLANGEIRKRPLIETNGETGEIVWDKGRDFATVRKVLSMPQVNIVKKTEVQTGGFSKESILPKRNSDKLIARKKDWDPKKYGGFDSPTVAYSVLVVAKVEKGKSKKLKSVKELLGITIMERSSFEKDPIDFLEAKGYKEVRKDLIIKLPKYSLFELENGRKRMLASAGELQKGNELALPSKYVNFLYLASHYEKLKGSPEDNEQKQLFVEQHKHYLDEIIEQISEFSKRVILADANLDKVLSAYNKHRDKPIREQAENIIHLFTLTNLGAPAAFKYFDTTIDRKRYTSTKEVLDATLIHQSITGLYETRIDLSQLGGD

SEQ ID NO: 9 - protein, 1334 aa, Listeria innocua
MKKPYTIGLDIGTNSVGWAVLTDQYDLVKRKMKIAGDSEKKQIKKNFWGVRLFDEGQTAADRRMARTARRRIERRRNRISYLQGIFAEEMSKTDANFFCRLSDSFYVDNEKRNSRHPFFATIEEEVEYHKNYPTIYHLREELVNSSEKADLRLVYLALAHIIKYRGNFLIEGALDTQNTSVDGIYKQFIQTYNQVFASGIEDGSLKKLEDNKDVAKILVEKVTRKEKLERILKLYPGEKSAGMFAQFISLIVGSKGNFQKPFDLIEKSDIECAKDSYEEDLESLLALIGDEYAELFVAAKNAYSAVVLSSIITVAETETNAKLSASMIERFDTHEEDLGELKAFIKLHLPKHYEEIFSNTEKHGYAGYIDGKTKQADFYKYMKMTLENIEGADYFIAKIEKENFLRKQRTFDNGAIPHQLHLEELEAILHQQAKYYPFLKENYDKIKSLVTFRIPYFVGPLANGQSEFAWLTRKADGEIRPWNIEEKVDFGKSAVDFIEKMTNKDTYLPKENVLPKHSLCYQKYLVYNELTKVRYINDQGKTSYFSGQEKEQIFNDLFKQKRKVKKKDLELFLRNMSHVESPTIEGLEDSFNSSYSTYHDLLKVGIKQEILDNPVNTEMLENIVKILTVFEDKRMIKEQLQQFSDVLDGVVLKKLERRHYTGWGRLSAKLLMGIRDKQSHLTILDYLMNDDGLNRNLMQLINDSNLSFKSIIEKEQVTTADKDIQSIVADLAGSPAIKKGILQSLKIVDELVSVMGYPPQTIVVEMARENQTTGKGKNNSRPRYKSLEKAIKEFGSQILKEHPTDNQELRNNRLYLYYLQNGKDMYTGQDLDIHNLSNYDIDHIVPQSFITDNSIDNLVLTSSAGNREKGDDVPPLEIVRKRKVFWEKLYQGNLMSKRKFDYLTKAERGGLTEADKARFIHRQLVETRQITKNVANILHQRFNYEKDDHGNTMKQVRIVTLKSALVSQFRKQFQLYKVRDVNDYHHAHDAYLNGVVANTLLKVYPQLEPEFVYGDYHQFDWFKANKATAKKQFYTNIMLFFAQKDRIIDENGEILWDKKYLDTVKKVMSYRQMNIVKKTEIQKGEFSKATIKPKGNSSKLIPRKTNWDPMKYGGLDSPNMAYAVVIEYAKGKNKLVFEKKIIRVTIMERKAFEKDEKAFLEEQGYRQPKVLAKLPKYTLYECEEGRRRMLASANEAQKGNQQVLPNHLVTLLHHAANCEVSDGKSLDYIESNREMFAELLAHVSEFAKRYTLAEANLNKINQLFEQNKEGDIKAIAQSFVDLMAFNAMGAPASFKFFETTIERKRYNNLKELLNSTIIYQSITGLYESRKRLDD

SEQ ID NO: 10 - protein, 1368 aa, Streptococcus pyogenes; identical to SEQ ID NO: 8

SEQ ID NO: 11 - protein, 1370 aa, Streptococcus agalactiae
MNKPYSIGLDIGTNSVGWSIITDDYKVPAKKMRVLGNTDKEYIKKNLIGALLFDGGNTAADRRLKRTARRRYTRRRNRILYLQEIFAEEMSKVDDSFFHRLEDSFLVEEDKRGSKYPIFATLQEEKDYHEKFSTIYHLRKELADKKEKADLRLIYIALAHIIKFRGHFLIEDDSFDVRNTDISKQYQDFLEIFNTTFENNDLLSQNVDVEAILTDKISKSAKKDRILAQYPNQKSTGIFAEFLKLIVGNQADFKKYFNLEDKTPLQFAKDSYDEDLENLLGQIGDEFADLFSAAKKLYDSVLLSGILTVIDLSTKAPLSASMIQRYDEHREDLKQLKQFVKASLPEKYQEIFADSSKDGYAGYIEGKTNQEAFYKYLSKLLTKQEDSENFLEKIKNEDFLRKQRTFDNGSIPHQVHLTELKAIIRRQSEYYPFLKENQDRIEKILTFRIPYYIGPLAREKSDFAWMTRKTDDSIRPWNFEDLVDKEKSAEAFIHRMTNNDFYLPEEKVLPKHSLIYEKFTVYNELTKVRYKNEQGETYFFDSNIKQEIFDGVFKEHRKVSKKKLLDFLAKEYEEFRIVDVIGLDKENKAFNASLGTYHDLEKILDKDFLDNPDNESILEDIVQTLTLFEDREMIKKRLENYKDLFTESQLKKLYRRHYTGWGRLSAKLINGIRDKESQKTILDYLIDDGRSNRNFMQLINDDGLSFKSIISKAQAGSHSDNLKEVVGELAGSPAIKKGILQSLKIVDELVKVMGYEPEQIVVEMARENQTTNQGRRNSRQRYKLLDDGVKNLASDLNGNILKEYPTDNQALQNERLFLYYLQNGRDMYTGEALDIDNLSQYDIDHIIPQAFIKDDSIDNRVLVSSAKNRGKSDDVPSLEIVKDCKVFWKKLLDAKLMSQRKYDNLTKAERGGLTSDDKARFIQRQLVETRQITKHVARILDERFNNELDSKGRRIRKVKIVTLKSNLVSNFRKEFGFYKIREVNNYHHAHDAYLNAVVAKAILTKYPQLEPEFVYGDYPKYNSYKTRKSATEKLFFYSNIMNFFKTKVTLADGTVVVKDDIEVNNDTGEIVWDKKKHFATVRKVLSYPQNNIVKKTEIQTGGFSKESILAHGNSDKLIPRKTKDIYLDPKKYGGFDSPIVAYSVLVVADIKKGKAQKLKTVTELLGITIMERSRFEKNPSAFLESKGYLNIRADKLIILPKYSLFELENGRRRLLASAGELQKGNELALPTQFMKFLYLASRYNESKGKPEEIEKKQEFVNQHVSYFDDILQLINDFSKRVILADANLEKINKLYQDNKENISVDELANNIINLFTFTSLGAPAAFKFFDKIVDRKRYTSTKEVLNSTLIHQSITGLYETRIDLGKLGED

SEQ ID NO: 12 - protein, 1345 aa, Streptococcus mutans
MKKPYSIGLDIGTNSVGWAVVTDDYKVPAKKMKVLGNTDKSHIEKNLLGALLFDSGNTAEDRRLKRTARRRYTRRRNRILYLQEIFSEEMGKVDDSFFHRLEDSFLVTEDKRGERHPIFGNLEEEVKYHENFPTIYHLRQYLADNPEKVDLRLVYLALAHIIKFRGHFLIEGKFDTRNNDVQRLFQEFLAVYDNTFENSSLQEQNVQVEEILTDKISKSAKKDRVLKLFPNEKSNGRFAEFLKLIVGNQADFKKHFELEEKAPLQFSKDTYEEELEVLLAQIGDNYAELFLSAKKLYDSILLSGILTVTDVGTKAPLSASMIQRYNEHQMDLAQLKQFIRQKLSDKYNEVFSDVSKDGYAGYIDGKTNQEAFYKYLKGLLNKIEGSGYFLDKIEREDFLRKQRTFDNGSIPHQIHLQEMRAIIRRQAEFYPFLADNQDRIEKLLTFRIPYYVGPLARGKSDFAWLSRKSADKITPWNFDEIVDKESSAEAFINRMTNYDLYLPNQKVLPKHSLLYEKFTVYNELTKVKYKTEQGKTAFFDANMKQEIFDGVFKVYRKVTKDKLMDFLEKEFDEFRIVDLTGLDKENKVFNASYGTYHDLCKILDKDFLDNSKNEKILEDIVLTLTLFEDREMIRKRLENYSDLLTKEQVKKLERRHYTGWGRLSAELIHGIRNKESRKTILDYLIDDGNSNRNFMQLINDDALSFKEEIAKAQVIGETDNLNQVVSDIAGSPAIKKGILQSLKIVDELVKIMGHQPENIVVEMARENQFTNQGRRNSQQRLKGLTDSIKEFGSQILKEHPVENSQLQNDRLFLYYLQNGRDMYTGEELDIDYLSQYDIDHIIPQAFIKDNSIDNRVLTSSKENRGKSDDVPSKDVVRKMKSYWSKLLSAKLITQRKFDNLTKAERGGLTDDDKAGFIKRQLVETRQITKHVARILDERFNTETDENNKKIRQVKIVTLKSNLVSNFRKEFELYKVREINDYHHAHDAYLNAVIGKALLGVYPQLEPEFVYGDYPHFHGHKENKATAKKFFYSNIMNFFKKDDVRTDKNGEIIWKKDEHISNIKKVLSYPQVNIVKKVEEQTGGFSKESILPKGNSDKLIPRKTKKFYWDTKKYGGFDSPIVAYSILVIADIEKGKSKKLKTVKALVGVTIMEKMTFERDPVAFLERKGYRNVQEENIIKLPKYSLFKLENGRKRLLASARELQKGNEIVLPNHLGTLLYHAKNIHKVDEPKHLDYVDKHKDEFKELLDVVSNFSKKYTLAEGNLEKIKELYAQNNGEDLKELASSFINLLTFTAIGAPATFKFFDKNIDRKRYTSTTEILNATLIHQSITGLYETRIDLNKLGGD

SEQ ID NO: 13 - protein, 1377 aa, Streptococcus agalactiae
MNKPYSIGLDIGTNSVGWSIITDDYKVPAKKMRVLGNTDKEYIKKNLIGALLFDGGNTAADRRLKRTARRRYTRRRNRILYLQEIFAEEMSKVDDSFFHRLEDSFLVEEDKRGSKYPIFATMQEEKYYHEKFPTIYHLRKELADKKEKADLRLVYLALAHIIKFRGHFLIEDDRFDVRNTDIQKQYQAFLEIFDTTFENNHLLSQNVDVEAILTDKISKSAKKDRILAQYPNQKSTGIFAEFLKLIVGNQADFKKHFNLEDKTPLQFAKDSYDEDLENLLGQIGDEFADLFSVAKKLYDSVLLSGILTVTDLSTKAPLSASMIQRYDEHHEDLKHLKQFVKASLPENYREVFADSSKDGYAGYIEGKTNQEAFYKYLLKLLTKQEGSEYFLEKIKNEDFLRKQRTFDNGSIPHQVHLTELRAIIRRQSEYYPFLKENQDRIEKILTFRIPYYVGPLAREKSDFAWMTRKTDDSIRPWNFEDLVDKEKSAEAFIHRMTNNDLYLPEEKVLPKHSLIYEKFTVYNELTKVRFLAEGFKDFQFLNRKQKETIFNSLFKEKRKVTEKDIISFLNKVDGYEGIAIKGIEKQFNASLSTYHDLKKILGKDFLDNTDNELILEDIVQTLTLFEDREMIKKCLDIYKDFFTESQLKKLYRRHYTGWGRLSAKLINGIRNKENQKTILDYLIDDGSANRNFMQLINDDDLSFKPIIDKARTGSHSDNLKEVVGELAGSPAIKKGILQSLKIVDELVKVMGYEPEQIVVEMARENQTTAKGLSRSRQRLTTLRESLANLKSNILEEKKPKYVKDQVENHHLSDDRLFLYYLQNGRDMYTKKALDIDNLSQYDIDHIIPQAFIKDDSIDNRVLVSSAKNRGKSDDVPSIEIVKARKMFWKNLLDAKLMSQRKYDNLTKAERGGLTSDDKARFIQRQLVETRQITKHVARILDERFNNEVDNGKKICKVKIVTLKSNLVSNFRKEFGFYKIREVNDYHHAHDAYLNAVVAKAILTKYPQLEPEFVYGMYRQKKLSKIVHEDKEEKYSEATRKMFFYSNLMNMFKRVVRLADGSIVVRPVIETGRYMRKTAWDKKKHFATVRKVLSYPQNNIVKKTEIQTGGFSKESILAHGNSDKLIPRKTKDIYLDPKKYGGFDSPIVAYSVLVVADIKKGKAQKLKTVTELLGITIMERSRFEKNPSAFLESKGYLNIRDDKLMILPKYSLFELENGRRRLLASAGELQKGNELALPTQFMKFLYLASRYNESKGKPEEIEKKQEFVNQHVSYFDDILQLINDFSKRVILADANLEKINKLYQDNKENIPVDELANNIINLFTFTSLGAPAAFKFFDKIVDRKRYTSTKEVLNSTLIHQSITGLYETRIDLGKLGED

SEQ ID NO: 14 - protein, 131 aa, Helicobacter hepaticus
MRILGFDIGITSIGWAYVESNELKDCGVRIFTKAENPKNGDSLAAPRREARGARRRLARRKARLNAIKRLLCKEFELNLNDYLANDGELPKAYQTSKDTKSPYELYTAFHWIIFAFCSIASSLSNRQMLPI

SEQ ID NO: 15 - protein, 1059 aa, Wolinella succinogenes
MIERILGVDLGISSLGWAIVEYDKDDEAANRIIDCGVRLFTAAETPKKKESPNKARREARGIRRVLNRRRVRMNMIKKLFLRAGLIQDVDLDGEGGMFYSKANRADVWELRHDGLYRLLKGDELARVLIHIAKHRGYKFIGDDEADEESGKVKKAGVVLRQNFEAAGCRTVGEWLWRERGANGKKRNKHGDYEISIHRDLLVEEVEAIFVAQQEMRSTIATDALKAAYREIAFFVRPMQRIEKMVGHCTYFPEERRAPKSAPTAEKFIAISKFFSTVIIDNEGWEQKIIERKTLEELLDFAVSREKVEFRHLRKFLDLSDNEIFKGLHYKGKPKTAKKREATLFDPNEPTELEFDKVEAEKKAWISLRGAAKLREALGNEFYGRFVALGKHADEATKILTYYKDEGQKRRELTKLPLEAEMVERLVKIGFSDFLKLSLKAIRDILPAMESGARYDEAVLMLGVPHKEKSAILPPLNKTDIDILNPTVIRAFAQFRKVANALVRKYGAFDRVHFELAREINTKGEIEDIKESQRKNEKERKEAADWIAETSFQVPLTRKNILKKRLYIQQDGRCAYTGDVIELERLFDEGYCEIDHILPRSRSADDSFANKVLCLARANQQKTDRTPYEWFGHDAARWNAFETRTSAPSNRVRTGKGKIDRLLKKNFDENSEMAFKDRNLNDTRYMARAIKTYCEQYWVFKNSHTKAPVQVRSGKLTSVLRYQWGLESKDRESHTHHAVDAIIIAFSTQGMVQKLSEYYRFKETHREKERPKLAVPLANFRDAVEEATRIENTETVKEGVEVKRLLISRPPRARVTGQAHEQTAKPYPRIKQVKNKKKWRLAPIDEEKFESFKADRVASANQKNFYETSTIPRVDVYHKKGKFHLVPIYLHEMVLNELPNLSLGTNPEAMDENFFKFSIFKDDLISIQTQGTPKKPAKIIMGYFKNMHGANMVLSSINNSPCEGFTCTPVSMDKKHKDKCKLCPEENRIAGRCLQGFLDYWSQEGLRPPRKEFECDQGVKFALDVKKYQIDPLGYYYEVKQEKRLGTIPQMRSAKKLVKK

SEQ ID NO: 16 - protein, 1409 aa, Wolinella succinogenes
MLVSPISVDLGGKNTGFFSFTDSLDNSQSGTVIYDESFVLSQVGRRSKRHSKRNNLRNKLVKRLFLLILQEHHGLSIDVLPDEIRGLFNKRGYTYAGFELDEKKKDALESDTLKEFLSEKLQSIDRDSDVEDFLNQIASNAESFKDYKKGFEAVFASATHSPNKKLELKDELKSEYGENAKELLAGLRVTKEILDEFDKQENQGNLPRAKYFEELGEYIATNEKVKSFFDSNSLKLTDMTKLIGNISNYQLKELRRYFNDKEMEKGDIWIPNKLHKITERFVRSWHPKNDADRQRRAELMKDLKSKEIMELLTTTEPVMTIPPYDDMNNRGAVKCQTLRLNEEYLDKHLPNWRDIAKRLNHGKFNDDLADSTVKGYSEDSTLLHRLLDTSKEIDIYELRGKKPNELLVKTLGQSDANRLYGFAQNYYELIRQKVRAGIWVPVKNKDDSLNLEDNSNMLKRCNHNPPHKKNQIHNLVAGILGVKLDEAKFAEFEKELWSAKVGNKKLSAYCKNIEELRKTHGNTFKIDIEELRKKDPAELSKEEKAKLRLTDDVILNEWSQKIANFFDIDDKHRQRFNNLFSMAQLHTVIDTPRSGFSSTCKRCTAENRFRSETAFYNDETGEFHKKATATCQRLPADTQRPFSGKIERYIDKLGYELAKIKAKELEGMEAKEIKVPIILEQNAFEYEESLRKSKTGSNDRVINSKKDRDGKKLAKAKENAEDRLKDKDKRIKAFSSGICPYCGDTIGDDGEIDHILPRSHTLKIYGTVFNPEGNLIYVHQKCNQAKADSIYKLSDIKAGVSAQWIEEQVANIKGYKTFSVLSAEQQKAFRYALFLQNDNEAYKKVVDWLRTDQSARVNGTQKYLAKKIQEKLTKMLPNKHLSFEFILADATEVSELRRQYARQNPLLAKAEKQAPSSHAIDAVMAFVARYQKVFKDGTPPNADEVAKLAMLDSWNPASNEPLTKGLSTNQKIEKMIKSGDYGQKNMREVFGKSIFGENAIGERYKPIVVQEGGYYIGYPATVKKGYELKNCKVVTSKNDIAKLEKIIKNQDLISLKENQYIKIFSINKQTISELSNRYFNMNYKNLVERDKEIVGLLEFIVENCRYYTKKVDVKFAPKYIHETKYPFYDDWRRFDEAWRYLQENQNKTSSKDRFVIDKSSLNEYYQPDKNEYKLDVDTQPIWDDFCRWYFLDRYKTANDKKSIRIKARKTFSLLAESGVQGKVFRAKRKIPTGYAYQALPMDNNVIAGDYANILLEANSKTLSLVPKSGISIEKQLDKKLDVIKKTDVRGLAIDNNSFFNADFDTHGIRLIVENTSVKVGNFPISAIDKSAKRMIFRALFEKEKGKRKKKTTISFKESGPVQDYLKVFLKKIVKIQLRTDGSISNIVVRKNAADFTLSFRSEHIQKLLK

SEQ ID NO: 17 - protein, 1374 aa, Fusobacterium nucleatum
MKKQKFSDYYLGFDIGTNSVGWCVTDLDYNVLRFNKKDMWGSRLFDEAKTAAERRVQRNSRRRLKRRKWRLNLLEEIFSDEIMKIDSNFFRRLKESSLWLEDKNSKEKFTLFNDDNYKDYDFYKQYPTIFHLRDELIKNPEKKDIRLIYLALHSIFKSRGHFLFEGQNLKEIKNFETLYNNLISFLEDNGINKSIDKDNIEKLEKIICDSGKGLKDKEKEFKGIFNSDKQLVAIFKLSVGSSVSLNDLFDTDEYKKEEVEKEKISFREQIYEDDKPIYYSILGEKIELLDIAKSFYDFMVLNNILSDSNYISEAKVKLYEEHKKDLKNLKYIIRKYNKENYDKLFKDKNENNYPAYIGLNKEKDKKEVVEKSRLKIDDLIKVIKGYLPKPERIEEKDKTIFNEILNKIELKTILPKQRISDNGTLPYQIHEVELEKILENQSKYYDFLNYEENGVSTKDKLLKTFKFRIPYYVGPLNSYHKDKGGNSWIVRKEEGKILPWNFEQKVDIEKSAEEFIKRMTNKCTYLNGEDVIPKDSFLYSEYIILNELNKVQVNDEFLNEENKRKIIDELFKENKKVSEKKFKEYLLVNQIANRTVELKGIKDSFNSNYVSYIKFKDIFGEKLNLDIYKEISEKSILWKCLYGDDKKIFEKKIKNEYGDILNKDEIKKINSFKFNTWGRLSEKLLTGIEFINLETGECYSSVMEALRRTNYNLMELLSSKFTLQESIDNENKEMNEVSYRDLIEESYVSPSLKRAILQTLKIYEEIKKITGRVPKKVFIEMARGGDESMKNKKIPARQEQLKKLYDSCGNDIANFSIDIKEMKNSLSSYDNNSLRQKKLYLYYLQFGKCMYTGREIDLDRLLQNNDTYDIDHIYPRSKVIKDDSFDNLVLVLKNENAEKSNEYPVKKEIQEKMKSFWRFLKEKNFISDEKYKRLTGKDDFELRGFMARQLVNVRQTTKEVGKILQQIEPEIKIVYSKAEIASSFREMFDFIKVRELNDTHHAKDAYLNIVAGNVYNTKFTEKPYRYLQEIKENYDVKKIYNYDIKNAWDKENSLEIVKKNMEKNTVNITRFIKEEKGELFNLNPIKKGETSNEIISIKPKLYDGKDNKLNEKYGYYTSLKAAYFIYVEHEKKNKKVKTFERITRIDSTLIKNEKNLIKYLVSQKKLLNPKIIKKIYKEQTLIIDSYPYTFTGVDSNKKVELKNKKQLYLEKKYEQILKNALKFVEDNQGETEENYKFIYLKKRNNNEKNETIDAVKERYNIEFNEMYDKFLEKLSSKDYKNYINNKLYTNFLNSKEKFKKLKLWEKSLILREFLKIFNKNTYGKYEIKDSQTKEKLFSFPEDTGRIRLGQSSLGNNKELLEESVTGLFVKKIKL

SEQ ID NO: 18 - protein, 1084 aa, Corynebacterium diphtheriae
MKYHVGIDVGTFSVGLAAIEVDDAGMPIKTLSLVSHIHDSGLDPDEIKSAVTRLASSGIARRTRRLYRRKRRRLQQLDKFIQRQGWPVIELEDYSDPLYPWKVRAELAASYIADEKERGEKLSVALRHIARHRGWRNPYAKVSSLYLPDGPSDAFKAIREEIKRASGQPVPETATVGQMVTLCELGTLKLRGEGGVLSARLQQSDYAREIQEICRMQEIGQELYRKIIDVVFAAESPKGSASSRVGKDPLQPGKNRALKASDAFQRYRIAALIGNLRVRVDGEKRILSVEEKNLVFDHLVNLTPKKEPEWVTIAEILGIDRGQLIGTATMTDDGERAGARPPTHDTNRSIVNSRIAPLVDWWKTASALEQHAMVKALSNAEVDDFDSPEGAKVQAFFADLDDDVHAKLDSLHLPVGRAAYSEDTLVRLTRRMLSDGVDLYTARLQEFGIEPSWTPPTPRIGEPVGNPAVDRVLKTVSRWLESATKTWGAPERVIIEHVREGFVTEKRAREMDGDMRRRAARNAKLFQEMQEKLNVQGKPSRADLWRYQSVQRQNCQCAYCGSPITFSNSEMDHIVPRAGQGSTNTRENLVAVCHRCNQSKGNTPFAIWAKNTSIEGVSVKEAVERTRHWVTDTGMRSTDFKKFTKAVVERFQRATMDEEIDARSMESVAWMANELRSRVAQHFASHGTTVRVYRGSLTAEARRASGISGKLKFFDGVGKSRLDRRHHAIDAAVIAFTSDYVAETLAVRSNLKQSQAHRQEAPQWREFTGKDAEHRAAWRVWCQKMEKLSALLTEDLRDDRVVVMSNVRLRLGNGSAHKETIGKLSKVKLSSQLSVSDIDKASSEALWCALTREPGFDPKEGLPANPERHIRVNGTHVYAGDNIGLFPVSAGSIALRGGYAELGSSFHHARVYKITSGKKPAFAMLRVYTIDLLPYRNQDLFSVELKPQTMSMRQAEKKLRDALATGNAEYLGWLVVDDELVVDTSKIATDQVKAVEAELGTIRRWRVDGFFSPSKLRLRPLQMSKEGIKKESAPELSKIIDRPGWLPAVNKLFSDGNVTVVRRDSLGRVRLESTAHLPVTWKVQ

SEQ ID NO: 19 - protein, 1395 aa, Treponema denticola
MKKEIKDYFLGLDVGTGSVGWAVTDTDYKLLKANRKDLWGMRCFETAETAEVRRLHRGARRRIERRKKRIKLLQELFSQEIAKTDEGFFQRMKESPFYAEDKTILQENTLFNDKDFADKTYHKAYPTINHLIKAWIENKVKPDPRLLYLACHNIIKKRGHFLFEGDFDSENQFDTSIQALFEYLREDMEVDIDADSQKVKEILKDSSLKNSEKQSRLNKILGLKPSDKQKKAITNLISGNKINFADLYDNPDLKDAEKNSISFSKDDFDALSDDLASILGDSFELLLKAKAVYNCSVLSKVIGDEQYLSFAKVKIYEKHKTDLTKLKNVIKKHFPKDYKKVFGYNKNEKNNNNYSGYVGVCKTKSKKLIINNSVNQEDFYKFLKTILSAKSEIKEVNDILTEIETGTFLPKQISKSNAEIPYQLRKMELEKILSNAEKHFSFLKQKDEKGLSHSEKIIMLLTFKIPYYIGPINDNHKKFFPDRCWVVKKEKSPSGKTTPWNFFDHIDKEKTAEAFITSRTNFCTYLVGESVLPKSSLLYSEYTVLNEINNLQIIIDGKNICDIKLKQKIYEDLFKKYKKITQKQISTFIKHEGICNKTDEVIILGIDKECTSSLKSYIELKNIFGKQVDEISTKNMLEEIIRWATIYDEGEGKTILKTKIKAEYGKYCSDEQIKKILNLKFSGWGRLSRKFLETVTSEMPGFSEPVNIITAMRETQNNLMELLSSEFTFTENIKKINSGFEDAEKQFSYDGLVKPLFLSPSVKKMLWQTLKLVKEISHITQAPPKKIFIEMAKGAELEPARTKTRLKILQDLYNNCKNDADAFSSEIKDLSGKIENEDNLRLRSDKLYLYYTQLGKCMYCGKPIEIGHVFDTSNYDIDHIYPQSKIKDDSISNRVLVCSSCNKNKEDKYPLKSEIQSKQRGFWNFLQRNNFISLEKLNRLTRATPISDDETAKFIARQLVETRQATKVAAKVLEKMFPETKIVYSKAETVSMFRNKFDIVKCREINDFHHAHDAYLNIVVGNVYNTKFTNNPWNFIKEKRDNPKIADTYNYYKVFDYDVKRNNITAWEKGKTIITVKDMLKRNTPIYTRQAACKKGELFNQTIMKKGLGQHPLKKEGPFSNISKYGGYNKVSAAYYTLIEYEEKGNKIRSLETIPLYLVKDIQKDQDVLKSYLTDLLGKKEFKILVPKIKINSLLKINGFPCHITGKTNDSFLLRPAVQFCCSNNEVLYFKKIIRFSEIRSQREKIGKTISPYEDLSFRSYIKENLWKKTKNDEIGEKEFYDLLQKKNLEIYDMLLTKHKDTIYKKRPNSATIDILVKGKEKFKSLIIENQFEVILEILKLFSATRNVSDLQHIGGSKYSGVAKIGNKISSLDNCILIYQSITGIFEKRIDLLKV

SEQ ID NO: 20 - protein, 1334 aa, Listeria monocytogenes
MKNPYTIGLDIGTNSVGWAVLTNQYDLVKRKMKVAGNSDKKQIKKNFWGVRLFDDGQTAVDRRMNRTARRRIERRRNRISYLQEIFAVEMANIDANFFCRLNDSFYVDSEKRNSRHPFFATIEEEVAYHDNYRTIYHLREKLVNSSEKADLRLVYLALAHIIKYRGNFLIEGALDTKNTSVDEVYKQFIETYNQVFMSNIEEGALAKVEENIEVANILAGKFTRREKFERILQLYPGEKSTGMFAQFISLIVGSKGNFQKVFDLIEKTDIECAKDSYEEDLETLLAIIGDEYAELFVAAKNTYNAVVLSSIITVTDTETNAKLSASMIERFDAHEKDLVELKAFIKLNLPKQYEEIFSNAAIDGYAGYIDGKTKQVDFYKYLKTILENIEGSDYFIAKIEEENFLRKQRTFDNGAIPHQLHLEELEAIIHQQAKYYPFLKEDYDKIKSLVTFRIPYFVGPLANGQSEFAWLTRKADGEIRPWNIEEKVDFGKSAVDFIEKMTNKDTYLPKENVLPKHSLCYQKYMVYNELTKIRYIDDQGKTNYFSGREKQQVFNDLFKQKRKVKKKDLELFLRNINHIESPTIEGLEDSFNASYATYHDLLKVGMKQEILDNPLNTEMLEDIVKILTVFEDKPMIKEQLQQFSDVLDGGVLKKLERRHYTGWGRLSAKLLVGIREKQSHLTILDYLMNDDGLNRNLMQLINDSNLSFKSIIEKEQVSTTDKDLQSIVAELAGSPAIKKGILQSLKIVDELVSIMGYPPQTIVVEMARENQTTGKGKNNSKPRYKSLEKAIKEFGSQILKEHPTDNQELKNNRLYLYYLQNGKDMYTGQELDIHNLSNYDIDHIVPQSFITDNSIDNLVLTSSAGNREKGGDVPPLEIVRKRKVFWEKLYQGNLMSKRKFDYLTKAERGGLTEADKARFIHRQLVETRQITKNVANILYQRFNKETDNHGNTMEQVRIVTLKSALVSQFRKQFQLYKVREVNGYHHAHDAYLNGVVANTLLKVYPQLEPEFVYGEYHQFDWFKANKATAKKQFYTNIMLFFAQKERIIDENGEILWDKKYLETIKKVLDYRQMNIVKKTEIQKGEFSKATIKPKGNSSKLIPRKENWDPMKYGGLDSPNMAYAVIIEHAKGKKKIVIEKKLIQINIMERKMFEKDEEAFLEEKGYRHPKVLTKLPKYTLYECEKGRRRMLASANEAQKGNQLVLSNHLVSLLYHAKNCEASDGKSLKYIEAHRETFSELLAQVSEFATRYTLADANLSKINNLFEQNKEGDIKAIAQSFVDLMAFNAMGAPASFKFFEATIDRKRYTNLKELLSSTIIYQSITGLYESRKRLDD

SEQ ID NO: 21 - protein, 1236 aa, Mycoplasma mobile
MYFYKNKENKLNKKVVLGLDLGIASVGWCLTDISQKEDNKFPIILHGVRLFETVDDSDDKLLNETRRKKRGQRRRNRRLFTRKRDFIKYLIDNNIIELEFDKNPKILVRNFIEKYINPFSKNLELKYKSVTNLPIGFHNLRKAAINEKYKLDKSELIVLLYFYLSLRGAFFDNPEDTKSKEMNKNEIEIFDKNESIKNAEFPIDKIIEFYKISGKIRSTINLKFGHQDYLKEIKQVFEKQNIDFMNYEKFAMEEKSFFSRIRNYSEGPGNEKSFSKYGLYANENGNPELIINEKGQKIYTKIFKTLWESKIGKCSYDKKLYRAPKNSFSAKVFDITNKLTDWKHKNEYISERLKRKILLSRFLNKDSKSAVEKILKEENIKFENLSEIAYNKDDNKINLPIINAYHSLTTIFKKHLINFENYLISNENDLSKLMSFYKQQSEKLFVPNEKGSYEINQNNNVLHIFDAISNILNKFSTIQDRIRILEGYFEFSNLKKDVKSSEIYSEIAKLREFSGTSSLSFGAYYKFIPNLISEGSKNYSTISYEEKALQNQKNNFSHSNLFEKTWVEDLIASPTVKRSLRQTMNLLKEIFKYSEKNNLEIEKIVVEVTRSSNNKHERKKIEGINKYRKEKYEELKKVYDLPNENTTLLKKLWLLRQQQGYDAYSLRKIEANDVINKPWNYDIDHIVPRSISFDDSFSNLVIVNKLDNAKKSNDLSAKQFIEKIYGIEKLKEAKENWGNWYLRNANGKAFNDKGKFIKLYTIDNLDEFDNSDFINRNLSDTSYITNALVNHLTFSNSKYKYSVVSVNGKQTSNLRNQIAFVGIKNNKETEREWKRPEGFKSINSNDFLIREEGKNDVKDDVLIKDRSFNGHHAEDAYFITIISQYFRSFKRIERLNVNYRKETRELDDLEKNNIKFKEKASFDNFLLINALDELNEKLNQMRFSRMVITKKNTQLFNETLYSGKYDKGKNTIKKVEKLNLLDNRTDKIKKIEEFFDEDKLKENELTKLHIFNHDKNLYETLKIIWNEVKIEIKNKNLNEKNYFKYFVNKKLQEGKISFNEWVPILDNDFKIIRKIRYIKFSSEEKETDEIIFSQSNFLKIDQRQNFSFHNTLYWVQIWVYKNQKDQYCFISIDARNSKFEKDEIKINYEKLKTQKEKLQIINEEPILKINKGDLFENEEKELFYIVGRDEKPQKLEIKYILGKKIKDQKQIQKPVKKYFPNWKKVNLTYMGEIFKK

SEQ ID NO: 22 - protein, 1372 aa, Legionella pneumophila
MESSQILSPIGIDLGGKFTGVCLSHLEAFAELPNHANTKYSVILIDHNNFQLSQAQRRATRHRVRNKKRNQFVKRVALQLFQHILSRDLNAKEETALCHYLNNRGYTYVDTDLDEYIKDETTINLLKELLPSESEHNFIDWFLQKMQSSEFRKILVSKVEEKKDDKELKNAVKNIKNFITGFEKNSVEGHRHRKVYFENIKSDITKDNQLDSIKKKIPSVCLSNLLGHLSNLQWKNLHRYLAKNPKQFDEQTFGNEFLRMLKNFRHLKGSQESLAVRNLIQQLEQSQDYISILEKTPPEITIPPYEARTNTGMEKDQSLLLNPEKLNNLYPNWRNLIPGIIDAHPFLEKDLEHTKLRDRKRIISPSKQDEKRDSYILQRYLDLNKKIDKFKIKKQLSFLGQGKQLPANLIETQKEMETHFNSSLVSVLIQIASAYNKEREDAAQGIWFDNAFSLCELSNINPPRKQKILPLLVGAILSEDFINNKDKWAKFKIFWNTHKIGRTSLKSKCKEIEEARKNSGNAFKIDYEEALNHPEHSNNKALIKIIQTIPDIIQAIQSHLGHNDSQALIYHNPFSLSQLYTILETKRDGFHKNCVAVTCENYWRSQKTEIDPEISYASRLPADSVRPFDGVLARMMQRLAYEIAMAKWEQIKHIPDNSSLLIPIYLEQNRFEFEESFKKIKGSSSDKTLEQAIEKQNIQWEEKFQRIINASMNICPYKGASIGGQGEIDHIYPRSLSKKHFGVIFNSEVNLIYCSSQGNREKKEEHYLLEHLSPLYLKHQFGTDNVSDIKNFISQNVANIKKYISFHLLTPEQQKAARHALFLDYDDEAFKTITKFLMSQQKARVNGTQKFLGKQIMEFLSTLADSKQLQLEFSIKQITAEEVHDHRELLSKQEPKLVKSRQQSFPSHAIDATLTMSIGLKEFPQFSQELDNSWFINHLMPDEVHLNPVRSKEKYNKPNISSTPLFKDSLYAERFIPVWVKGETFAIGFSEKDLFEIKPSNKEKLFTLLKTYSTKNPGESLQELQAKSKAKWLYFPINKTLALEFLHHYFHKEIVTPDDTTVCHFINSLRYYTKKESITVKILKEPMPVLSVKFESSKKNVLGSFKHTIALPATKDWERLFNHPNFLALKANPAPNPKEFNEFIRKYFLSDNNPNSDIPNNGHNIKPQKHKAVRKVFSLPVIPGNAGTMMRIRRKDNKGQPLYQLQTIDDTPSMGIQINEDRLVKQEVLMDAYKTRNLSTIDGINNSEGQAYATFDNWLTLPVSTFKPEIIKLEMKPHSKTRRYIRITQSLADFIKTIDEALMIKPSDSIDDPLNMPNEIVCKNKLFGNELKPRDGKMKIVSTGKIVTYEFESDSTPQWIQTLYVTQLKKQP

SEQ ID NO: 23 - protein, 1122 aa, Streptococcus thermophilus
MSDLVLGLDIGIGSVGVGILNKVTGEIIHKNSRIFPAAQAENNLVRRTNRQGRRLTRRKKHRIVRLNRLFEESGLITDFTKISINLNPYQLRVKGLTDELSNEELFIALKNMVKHRGISYLDDASDDGNSSVGDYAQIVKENSKQLETKTPGQIQLERYQTYGQLRGDFTVEKDGKKHRLINVFPTSAYRSEALRILQTQQEFNSQITDEFINRYLEILTGKRKYYHGPGNEKSRTDYGRYRTNGETLDNIFGILIGKCTFYPDEFRAAKASYTAQEFNLLNDLNNLTVPTETKKLSKEQKNQIINYVKNEKVMGPAKLFKYIAKLLSCDVADIKGHRIDKSGKAEIHTFEAYRKMKTLETLDIEQMDRETLDKLAYVLTLNTEREGIQEALEHEFADGSFSQKQVDELVQFRKANSSIFGKGWHNFSVKLMMELIPELYETSEEQMTILTRLGKQKTTSSSNKTKYIDEKLLTEEIYNPVVAKSVRQAIKIVNAAIKEYGDFDNIVIEMARETNEDDEKKAIQKIQKANKDEKDAAMLKAANQYNGKAELPHSVFHGHKQLATKIRLWHQQGERCLYTGKTISIHDLINNPNQFEVDHILPLSITFDDSLANKVLVYATANQEKGQRTPYQALDSMDDAWSFRELKAFVRESKTLSNKKKEYLLTEEDISKFDVRKKFIERNLVDTRYASRVVLNALQEHFRAHKIDTKVSVVRGQFTSQLRRHWGIEKTRDTYHHHAVDALIIAASSQLNLWKKQKNTLVSYSEEQLLDIETGELISDDEYKESVFKAPYQHFVDTLKSKEFEDSILFSYQVDSKFNRKISDATIYATRQAKVGKDKKDETYVLGKIKDIYTQDGYDAFMKIYKKDKSKFLMYRHDPQTFEKVIEPILENYPNKEMNEKGKEVPCNPFLKYKEEHGYIRKYSKKGNGPEIKSLKYYDSKLLGNPIDITPENSKNKVVLQSLKPWRTDVYFNKNTGKYEILGLKYADLQFEKKTGTYKISQEKYNGIMKEEGVDSDSEFKFTLYKNDLLLVKDTETKEQQLFRFLSRTMPNVKYYVELKPYSKDKFEKNESLIEILGSADKSGRCIKGLGKSNISIYKVRTDVLGNQHIIKNEGDKPKLDF

SEQ ID NO: 24 - protein, 1128 aa, Streptococcus thermophilus
MSDLVLGLDIGIGSVGVGILNKVTGEIIHKNSRIFPAAQAENNLVRRTNRQGRRLTRRKKHRIVRLNRLFEESGLITDFTKISINLNPYQLRVKGLTDELSNEELFIALKNMVKHRGISYLDDASDDGNSSVGDYAQIVKENSKQLETKTPGQIQLERYQTYGQLRGDFTVEKDGKKHRLINVFPTSAYRSEALRILQTQQEFNPQITDEFINRYLEILTGKRKYYHGPGNEKSRTDYGRYRTSGETLDNIFGILIGKCTFYPEEFRAAKASYTAQEFNLLNDLNNLTVPTETKKLSKEQKNQIINYVKNEKAMGPAKLFKYIAKLLSCDVADIKGYRIDKSGKAEIHTFEAYRKMKTLETLDIEQMDRETLDKLAYVLTLNTEREGIQEALEHEFADGSFSQKQVDELVQFRKANSSIFGKGWHNFSVKLMMELIPELYETSEEQMTILTRLGKQKRLRLQIKQNISNKTKYIDEKLLTEEIYNPVVAKSVRQAIKIVNAAIKEYGDFDNIVIEMARETNEDDEKKAIQKIQKANKDEKDAAMLKAANQYNGKAELPHSVFHGHKQLATKIRLWHQQGERCLYTGKTISIHDLINNPNQFEVDHILPLSITFDDSLANKVLVYATANQEKGQRTPYQALDSMDDAWSFRELKAFVRESKTLSNKKKEYLLTEEDISKFDVRKKFIERNLVDTRYASRVVLNALQEHFRAHKIDTKVSVVRGQFTSQLRRHWGIEKTRDTYHHHAVDALIIAASSQLNLWKKQKNTLVSYSEEQLLDIETGELISDDEYKESVFKAPYQHFVDTLKSKEFEDSILFSYQVDSKFNRKISDATIYATRQAKVGKDKKDETYVLGKIKDIYTQDGYDAFMKIYKKDKSKFLMYRHDPQTFEKVIEPILENYPNKQMNEKGKEVPCNPFLKYKEEHGYIRKYSKKGNGPEIKSLKYYDSKLLGNPIDITPENSKNKVVLQSLKPWRTDVYFNKATGKYEILGLKYADLQFEKGTGTYKISQEKYNDIKKKEGVDSDSEFKFTLYKNDLLLVKDTETKEQQLFRFLSRTLPKQKHYVELKPYDKQKFEGGEALIKVLGNVANGGQCIKGLAKSNISIYKVRTDVLGNQHIIKNEGDKPKLDF

SEQ ID NO: 25 - protein, 1123 aa, Francisella tularensis
MNVKILPIAIDLDVKNTGVFSAFYQKGTSLEKLDNKNGKVYELSKDSYTLLMNNRTARRHKRRGIDRKQLVKRLFKLVWTEQLNLEWDKDTQQAISFLFNRRGFSFITDGYSTEYLNIVPEQVKAILMDIFDDYNGEDDLDSYLKLATEQESKISEIYNKLMQKILEFKLRKLCTDIKDDKVSTKTLKEITSYEFELLADYLANYSESLKTQKFSYTDKQGNLKELSYYHHDKYNIQEFLKRHATINDEILGTLLTDDFDIWNFNFEKFDFDKNEEKLQNQEDKDHTQAHLHHFVFVVNKIKSEMASGGRHRSQYFQEITNVLDENNHQEGYLKNFCENLHNKKYSNLSVKNLVNLVGNLSNLELKPLRKYFNDKIHAKADHWDEQKFTETYCHWILGEWRVGVKDQDKKDGAKYSYKDLCNELKQKVTKAGLIDFLLELDPCRTIPPYLDNNNRKPPKCQSLILNPKFLDNQYPNWQQYLQELKKLQSIQDYLDSFETDLKDLKSSKDQPYFVEYKSSNQQMASGQRDYKDLDARILQFIFDRVKASDELLLNEIYFQAKKLKQKASSELEKLESSKKLDEVIANSQLSQILKSQHTNGIFEQGTFLHLVCKYYKQRQRARDSRLYIMPEYRYDKKLDKYNNTGRFDDNNQLLTYCNHKPRQKRYQLLNDLAGVLQVSRNQLLSSVEEWFQQAQRVGEISKSQDEQIFEWLKSFKIASYCKAAVEMQKQYRGTLKNAIQTAIFRQSENINKNKNTGNQQQALSENSKDVKSLTADEKKLLKLIENIAKASQKIGESLGLNDKQIKKFNSIYSFAQIQQIAFAKRKGNANTCAVCSADNAHRMQQIKITELVEDNKDNIILSAKAQRLPAIPTRIVDGAVKKMATILAKNIVDDNWQNIKQVLSAKHQLHIPIITESNAFEFEPALADVKGKSLKDRRKKALERISPENIFKDKNNRIKEFAKGISAYSGANLTDGDFDGAKEELDHIIPRSHKKYGTLNDEANLICVTRDDNKNIFAIDTSKWFEIETPSDLRDIGVATIQYKIDNNSRPKVRVKLDYVIDDDSKINYFMNHSLLKSRYPDKVLEILKQSTIIEFESSGFNKTIKEMLGMTLAGIYNETSNN

SEQ ID NO: 26 - protein, 1436 aa, Bacteroides fragilis
MKRILGLDLGTNSIGWALVNEAENKDERSSIVKLGVRVNPLTVDELTNFEKGKSITTNADRTLKRGMRRNLQRYKLRRETLTEVLKEHKLITEDTILSENGNRTTFETYRLRAKAVTEEISLEEFARVLLMINKKRGYKSSRKAKGVEEGTLIDGMDIARELYNNNLTPGELCLQLLDAGKKFLPDFYRSDLQNELDRIWEKQKEYYPEILTDVLKEELRGKKRDAVWAICAKYFVWKENYTEWNKEKGKTEQQEREHKLEGIYSKRKRDEAKRENLQWRVNGLKEKLSLEQLVIVFQEMNTQINNSSGYLGAISDRSKELYFNKQTVGQYQMEMLDKNPNASLRNMVFYRQDYLDEFNMLWEKQAVYHKELTEELKKEIRDIIIFYQRRLKSQKGLIGFCEFESRQIEVDIDGKKKIKTVGNRVISRSSPLFQEFKIWQILNNIEVTVVGKKRKRRKLKENYSALFEELNDAEQLELNGSRRLCQEEKELLAQELFIRDKMTKSEVLKLLFDNPQELDLNFKTIDGNKTGYALFQAYSKMIEMSGHEPVDFKKPVEKVVEYIKAVFDLLNWNTDILGFNSNEELDNQPYYKLWHLLYSFEGDNTPTGNGRLIQKMTELYGFEKEYATILANVSFQDDYGSLSAKAIHKILPHLKEGNRYDVACVYAGYRHSESSLTREEIANKVLKDRLMLLPKNSLHNPVVEKILNQMVNVINVIIDIYGKPDEIRVELARELKKNAKEREELTKSIAQTTKAHEEYKTLLQTEFGLTNVSRTDILRYKLYKELESCGYKTLYSNTYISREKLFSKEFDIEHIIPQARLFDDSFSNKTLEARSVNIEKGNKTAYDFVKEKFGESGADNSLEHYLNNIEDLFKSGKISKTKYNKLKMAEQDIPDGFIERDLRNTQYIAKKALSMLNEISHRVVATSGSVTDKLREDWQLIDVMKELNWEKYKALGLVEYFEDRDGRQIGRIKDWTKRNDHRHHAMDALTVAFTKDVFIQYFNNKNASLDPNANEHAIKNKYFQNGRAIAPMPLREFRAEAKKHLENTLISIKAKNKVITGNINKTRKKGGVNKNMQQTPRGQLHLETIYGSGKQYLTKEEKVNASFDMRKIGTVSKSAYRDALLKRLYENDNDPKKAFAGKNSLDKQPIWLDKEQMRKVPEKVKIVTLEAIYTIRKEISPDLKVDKVIDVGVRKILIDRLNEYGNDAKKAFSNLDKNPIWLNKEKGISIKRVTISGISNAQSLHVKKDKDGKPILDENGRNIPVDFVNTGNNHHVAVYYRPVIDKRGQLVVDEAGNPKYELEEVVVSFFEAVTRANLGLPIIDKDYKTTEGWQFLFSMKQNEYFVFPNEKTGFNPKEIDLLDVENYGLISPNLFRVQKFSLKNYVFRHHLETTIKDTSSILRGITWIDFRSSKGLDTIVKVRVNHIGQIVSVGEY

SEQ ID NO: 27 - protein, 1314 aa, Mycoplasma synoviae
MLRLYCANNLVLNNVQNLWKYLLLLIFDKKIIFLFKIKVILIRRYMENNNKEKIVIGFDLGVASVGWSIVNAETKEVIDLGVRLFSEPEKADYRRAKRTTRRLLRRKKFKREKFHKLILKNAEIFGLQSRNEILNVYKDQSSKYRNILKLKINALKEEIKPSELVWILRDYLQNRGYFYKNEKLTDEFVSNSFPSKKLHEHYEKYGFFRGSVKLDNKLDNKKDKAKEKDEEEESDAKKESEELIFSNKQWINEIVKVFENQSYLTESFKEEYLKLFNYVRPFNKGPGSKNSRTAYGVFSTDIDPETNKFKDYSNIWDKTIGKCSLFEEEIRAPKNLPSALIFNLQNEICTIKNEFTEFKNWWLNAEQKSEILKFVFTELFNWKDKKYSDKKFNKNLQDKIKKYLLNFALENFNLNEEILKNRDLENDTVLGLKGVKYYEKSNATADAALEFSSLKPLYVFIKFLKEKKLDLNYLLGLENTEILYFLDSIYLAISYSSDLKERNEWFKKLLKELYPKIKNNNLEIIENVEDIFEITDQEKFESFSKTHSLSREAFNHIIPLLLSNNEGKNYESLKHSNEELKKRTEKAELKAQQNQKYLKDNFLKEALVPLSVKTSVLQAIKIFNQIIKNFGKKYEISQVVIEMARELTKPNLEKLLNNATNSNIKILKEKLDQTEKFDDFTKKKFIDKIENSVVFRNKLFLWFEQDRKDPYTQLDIKINEIEDETEIDHVIPYSKSADDSWFNKLLVKKSTNQLKKNKTVWEYYQNESDPEAKWNKFVAWAKRIYLVQKSDKESKDNSEKNSIFKNKKPNLKFKNITKKLFDPYKDLGFLARNLNDTRYATKVFRDQLNNYSKHHSKDDENKLFKVVCMNGSITSFLRKSMWRKNEEQVYRFNFWKKDRDQFFHHAVDASIIAIFSLLTKTLYNKLRVYESYDVQRREDGVYLINKETGEVKKADKDYWKDQHNFLKIRENAIEIKNVLNNVDFQNQVRYSRKANTKLNTQLFNETLYGVKEFENNFYKLEKVNLFSRKDLRKFILEDLNEESEKNKKNENGSRKRILTEKYIVDEILQILENEEFKDSKSDINALNKYMDSLPSKFSEFFSQDFINKCKKENSLILTFDAIKHNDPKKVIKIKNLKFFREDATLKNKQAVHKDSKNQIKSFYESYKCVGFIWLKNKNDLEESIFVPINSRVIHFGDKDKDIFDFDSYNKEKLLNEINLKRPENKKFNSINEIEFVKFVKPGALLLNFENQQIYYISTLESSSLRAKIKLLNKMDKGKAVSMKKITNPDEYKIIEHVNPLGINLNWTKKLENNN

SEQ ID NO: 28 - protein, 1368 aa, Streptococcus pyogenes
MDKKYSIGLDIGTNSVGWAVITDDYKVPSKKFKVLGNTDRHSIKKNLIGALLFDSGETAEATRLKRTARRRYTRRKNRICYLQEIFSNEMAKVDDSFFHRLEESFLVEEDKKHERHPIFGNIVDEVAYHEKYPTIYHLRKKLVDSTDKADLRLIYLALAHMIKFRGHFLIEGDLNPDNSDVDKLFIQLVQTYNQLFEENPINASGVDAKAILSARLSKSRRLENLIAQLPGEKKNGLFGNLIALSLGLTPNFKSNFDLAEDAKLQLSKDTYDDDLDNLLAQIGDQYADLFLAAKNLSDAILLSDILRLNSEITKAPLSASMIKRYDEHHQDLTLLKALVRQQLPEKYKEIFFDQSKNGYAGYIDGGASQEEFYKFIKPILEKMDGTEELLAKLNREDLLRKQRTFDNGSIPHQIHLGELHAILRRQEDFYPFLKDNREKIEKILTFRIPYYVGPLARGNSRFAWMTRKSEETITPWNFEEVVDKGASAQSFIERMTNFDKNLPNEKVLPKHSLLYEYFTVYNELTKVKYVTEGMRKPAFLSGEQKKAIVDLLFKTNRKVTVKQLKEDYFKKIECFDSVEISGVEDRFNASLGTYHDLLKIIKDKDFLDNEENEDILEDIVLTLTLFEDREMIEERLKTYAHLFDDKVMKQLKRRRYTGWGRLSRKLINGIRDKQSGKTILDFLKSDGFANRNFMQLIHDDSLTFKEDIQKAQVSGQGDSLHEHIANLAGSPAIKKGILQTVKVVDELVKVMGRHKPENIVIEMARENQTTQKGQKNSRERMKRIEEGIKELGSQILKEHPVENTQLQNEKLYLYYLQNGRDMYVDQELDINRLSDYDVDHIVPQSFIKDDSIDNKVLTRSDKNRGKSNNVPSEEVVKKMKNYWRQLLNAKLITQRKFDNLTKAERGGLSELDKAGFIKRQLVETRQITKHVAQILDSRMNTKYDENDKLIREVKVITLKSKLVSDFRKDFQFYKVREINNYHHAHDAYLNAVVGTALIKKYPKLESEFVYGDYKVYDVRKMIAKSEQEIGKATAKYFFYSNIMNFFKTEITLANGEIRKRPLIETNGETGEIVWDKGRDFATVRKVLSMPQVNIVKKTEVQTGGFSKESILPKRNSDKLIARKKDWDPKKYGGFDSPTVAYSVLVVAKVEKGKSKKLKSVKELLGITIMERSSFEKNPIDFLEAKGYKEVRKDLIVKLPKYSLFELENGRKRMLASAGELQKGNELALPSKYVNFLYLASHYEKLKGSPEDNEQKQLFVEQHKHYLDEIIEQISEFSKRVILADANLDKVLSAYNKHRDKPIREQAENIIHLFTLTNLGAPAAFKYFDTTIDRKRYTSTKEVLDATFIHQSITGLYETRIDLSQLGGD

SEQ ID NO: 29 - protein, 1368 aa, Streptococcus pyogenes
MDKKYSIGLDIGTNSVGWAVITDDYKVPSKKFKVLGNTDRHSIKKNLIGALLFDSGETAEATRLKRTARRRYTRRKNRICYLQEIFSNEMAKVDDSFFHRLEESFLVEEDKKHERHPIFGNIVDEVAYHEKYPTIYHLRKKLVDSTDKADLRLIYLALAHMIKFRGHFLIEGDLNPDNSDVDKLFIQLVQTYNQLFEENPINASGVDAKAILSARLSKSRRLENLIAQLPGEKKNGLFGNLIALSLGLTPNFKSNFDLAEDAKLQLSKDTYDDDLDNLLAQIGDQYADLFLAAKNLSDAILLSDILRVNTEITKAPLSASMIKRYDEHHQDLTLLKALVRQQLPEKYKEIFFDQSKNGYAGYIDGGASQEEFYKFIKPILEKMDGTEELLVKLNREDLLRKQRTFDNGSIPHQIHLGELHAILRRQEDFYPFLKDNREKIEKILTFRIPYYVGPLARGNSRFAWMTRKSEETITPWNFEEVVDKGASAQSFIERMTNFDKNLPNEKVLPKHSLLYEYFTVYNELTKVKYVTEGMRKPAFLSGEQKKAIVDLLFKTNRKVTVKQLKEDYFKKIECFDSVEISGVEDRFNASLGTYHDLLKIIKDKDFLDNEENEDILEDIVLTLTLFEDREMIEERLKTYAHLFDDKVMKQLKRRRYTGWGRLSRKLINGIRDKQSGKTILDFLKSDGFANRNFMQLIHDDSLTFKEDIQKAQVSGQGDSLHEHIANLAGSPAIKKGILQTVKVVDELVKVMGRHKPENIVIEMARENQTTQKGQKNSRERMKRIEEGIKELGSQILKEHPVENTQLQNEKLYLYYLQNGRDMYVDQELDINRLSDYDVDHIVPQSFLKDDSIDNKVLTRSDKNRGKSDNVPSEEVVKKMKNYWRQLLNAKLITQRKFDNLTKAERGGLSELDKAGFIKRQLVETRQITKHVAQILDSRMNTKYDENDKLIREVKVITLKSKLVSDFRKDFQFYKVREINNYHHAHDAYLNAVVGTALIKKYPKLESEFVYGDYKVYDVRKMIAKSEQEIGKATAKYFFYSNIMNFFKTEITLANGEIRKRPLIETNGETGEIVWDKGRDFATVRKVLSMPQVNIVKKTEVQTGGFSKESILPKRNSDKLIARKKDWDPKKYGGFDSPTVAYSVLVVAKVEKGKSKKLKSVKELLGITIMERSSFEKNPIDFLEAKGYKEVKKDLIIKLPKYSLFELENGRKRMLASAGELQKGNELALPSKYVNFLYLASHYEKLKGSPEDNEQKQLFVEQHKHYLDEIIEQISEFSKRVILADANLDKVLSAYNKHRDKPIREQAENIIHLFTLTNLGAPAAFKYFDTTIDRKRYTSTKEVLDATLIHQSITGLYETRIDLSQLGGD

SEQ ID NO: 30 - protein, 1370 aa, Streptococcus agalactiae; identical to SEQ ID NO: 11

SEQ ID NO: 31 - protein, 1173 aa, Rhodospirillum rubrum
MRPIEPWILGLDIGTDSLGWAVFSCEEKGPPTAKELLGGGVRLFDSGRDAKDHTSRQAERGAFRRARRQTRTWPWRRDRLIALFQAAGLTPPAAETRQIALALRREAVSRPLAPDALWAALLHLAHHRGFRSNRIDKRERAAAKALAKAKPAKATAKATAPAKEADDEAGFWEGAEAALRQRMAASGAPTVGALLADDLDRGQPVRMRYNQSDRDGVVAPTRALIAEELAEIVARQSSAYPGLDWPAVTRLVLDQRPLRSKGAGPCAFLPGEDRALRALPTVQDFIIRQTLANLRLPSTSADEPRPLTDEEHAKALALLSTARFVEWPALRRALGLKRGVKFTAETERNGAKQAARGTAGNLTEAILAPLIPGWSGWDLDRKDRVFSDLWAARQDRSALLALIGDPRGPTRVTEDETAEAVADAIQIVLPTGRASLSAKAARAIAQAMAPGIGYDEAVTLALGLHHSHRPRQERLARLPYYAAALPDVGLDGDPVGPPPAEDDGAAAEAYYGRIGNISVHIALNETRKIVNALLHRHGPILRLVMVETTRELKAGADERKRMIAEQAERERENAEIDVELRKSDRWMANARERRQRVRLARRQNNLCPYTSTPIGHADLLGDAYDIDHVIPLARGGRDSLDNMVLCQSDANKTKGDKTPWEAFHDKPGWIAQRDDFLARLDPQTAKALAWRFADDAGERVARKSAEDEDQGFLPRQLTDTGYIARVALRYLSLVTNEPNAVVATNGRLTGLLRLAWDITPGPAPRDLLPTPRDALRDDTAARRFLDGLTPPPLAKAVEGAVQARLAALGRSRVADAGLADALGLTLASLGGGGKNRADHRHHFIDAAMIAVTTRGLINQINQASGAGRILDLRKWPRTNFEPPYPTFRAEVMKQWDHIHPSIRPAHRDGGSLHAATVFGVRNRPDARVLVQRKPVEKLFLDANAKPLPADKIAEIIDGFASPRMAKRFKALLARYQAAHPEVPPALAALAVARDPAFGPRGMTANTVIAGRSDGDGEDAGLITPFRANPKAAVRTMGNAVYEVWEIQVKGRPRWTHRVLTRFDRTQPAPPPPPENARLVMRLRRGDLVYWPLESGDRLFLVKKMAVDGRLALWPARLATGKATALYAQLSCPNINLNGDQGYCVQSAEGIRKEKIRTTSCTALGRLRLSKKAT

SEQ ID NO: 32 - protein, 997 aa, Maritimibacter alkaliphilus
MKVLVDAGLMPSDPAAAKALETLDPYELRATGLDVMLPLTHLGRAVFHLNQRRGFKSNRKTDRGDNESGKIKDATKRLTWAMQEAGARTYGEFLHMRRARASDPRQVPSVRTRLSVASRGGPDSKEEAGYDFYPERAHLEDEFHALWSAQAAFHPDLTCELRDVVFEKIFYQRPLKEPKVGLCLFTAEERLPKAHPLTGRRVLYETVNQLRVTADGRTTRPLTLEERDMIVYALDNKKPVKSLSSMHLKLVALGKLVKLKDGERFTLESGVRDAIACDPIRATMGHPDGFGPAWSRLDWQAQWALIEKLRQVQSDDDFASLVAWLGATHNLSEDHAKRVANLHLPEGYGRLGLTATEAILCNLKAEVCTYSQAVERWGKHHSNQRTGECLEALPYYGEVLDRHVIPGTYNEDDDDVTRYGRITNPTVHIGLNQLRRLVNRIIATYGKPDQIVVELARELKQSEAQKSEALKKIRDTTADAIRRGRQLEEIGQKNTGANRLLLRLWEDLGPAVGPRCCPYTGKPISVTMLFDGACDVDHILPYSRTLDDSFANRTICLREANRQKGDRTPWEAWGGSDQWDAIEANLKDLPENKRKRFAPDAMERFEGERDFLDRALVDTQYLARISRAYLDTLFTEGGHVWVVPGRMTEMLRRHWGLNALLSDKDRGAGKVKNRTDHRHHAIDAAVIAATDHSLVNRISKAAGQGESAGQSAELIARDTPEPWEGFRNDISAQIARIVVSHRADHGRIDVEGRKHGKDSTAGRLHNDTAYGIVDDHTVVSRTPLLSLKPGDIEVTTKGKNIRDTQLQKALSVATTGKDGKGFEEALRNFAEKEGPYQGIRRVRLIETLQSSARVEVGSDEDGQPLKAYKGDSNHCYDLWKLPDGKVVPHVVSTYEAHAGTDKRPHPAAKRILRVFKKDMVAIEQDDQTAIFYVQKLDRANGLFLAPHLEANADARHRNPNDAFKFLQMGAGSVVRNKLRRVYVDEIGRIKDPGPPKH

SEQ ID NO: 33 - protein, 1027 aa, Blastopirellula marina
MFSESGDQPSLVDCGVRIFPEGVERDQQGGEKSKSQSRRVARGIRRQVRRRAQRLRHLKHALITTGLFPADVVDQQEVLASNPYELRSRALSEKLEPYEIGRILLHLAKRRGFLSNRTTDRSGGNELKGILAEMTQLQGEIAAHGCQTLGQYLHQLGDDGETFAQRLRGRHTLRAMYEDEFEKIWERQASYYPALLTEELRGGEEGKQSYPLVPTARRKSESLLKRFGLHGLLFFQRKMYWPKSVIGRCDLEPKEKRCPKADRLAQRFRILQEVNNLRLISPADRKEYTFAEFVGAGADKKLVDYLCEAKERTFPQIRKKFKLPETISFNYERGERSKLQGHETDAHFNGKKGLGKRRWSEIAEDVKDHIIQIVLEEDREDVALRKLTQDCSLTVEEAHKAMALHLPAGYSQYSRVAISRLLPHLELGKLLMGNDASDSAMHAAGYLRPDEREVRQYDLLPEPPDIPNPLVRQALYEVRKVINAIIREYGALGTIRVELAREAKKSAEQRTQIRIANAKRERENAAIAKTLQEMSPAIRPTRRNIQRYLLWKDQGGVCIYTGKVISQAQLFDSGEVDVDHILPRWRSLDDSMANKVIAHRSANNEKGDRTPWEWLGHDKPRFDELLLRAQRLPYGKRQRFIQKEVELTNFVERQLRDTTYVSRLVVQYLKGLGVPITTVKGPMTAELRHHWGLNALLNEDGSQKKNRSDHRHHAIDAIVIGLTDAKRLHALANARGKDLQPPWSEFRSDVATALGRMAVSHRVRRRIQGALHEETIYGPTQKAAQPTSTDQRPWAKDWIEDSQIVVRRKSVSDLTNTKHLAKIRDVTIRKILEDHLRRQKVDPTKPGVIPKDAFAGSNAPQMPSGVPIKKVRLVERGETWRKIGSGEASKFIKPGSNHHISYFAISRKGRESWKAHVTIMLDAACIAKESINNGKIVNRSIGDQGRFLMSLSIGEMFEITNNGGEILLCVVRKIDQSGRIYYKIHDDARESMDLKKDNLYMSPSKMQQFDARKVTVTPLGKIRNAND

SEQ ID NO: 34 - protein, 158 aa, Francisella tularensis
MIDFLLELDPCITIPPYLDNNNRKPPKCQSLILNPKFLDNQYPNWQQYLQELKKLQSIQDYLDSFETDLKDLKSSKDQPYFVEYKSSNQQMASGQRDYKDLDARILQFIFDRVKASDELLLSEIYFQAKKLKQKASSELEKLESSKKLDEVIANSQLS

SEQ ID NO: 35 - protein, 393 aa, Francisella tularensis
MNVKILPIAIDLDVKNTGVFSAFYQKGTSLEKLDNKNGKVYELSKDSYTLLMNNRTAQRHQRRGIDRKQLVKRLFKLVWTEQLNLEWDKDTQQAISFLFNRRGFSFITDGYSTEYLNIVPEQVKAILMDIFDDYNGEDDLDSYLKLATEQESKISEIYNKLMQKILEFKLRKLCTDIKDDKVSTKTLKEITSYEFELLADYLANYSESLKTQKFSYTDKQGNLKELSYYHHDKYNIQEFLKRHATINDEILDTLLTDDFDIWNFNFEKFDFDKNEEKLQSQEDKDHTQAYFHHFVFAVNKIKSEMASGGRHRSQYFQEITNVLDENNHQEGYLKNFCENLHNKKYSNLSVKNLVNLVGNLSNLELKPLRKYFNDKNLIIGMSKSLQKLIATGY

SEQ ID NO: 36 - protein, 1066 aa, Rhodopseudomonas palustris
MSERVVRRILGIDLGIASCGWGVVDISGAGGGIIATGVRCFDAPLIDKTGEPKSATRRTARGQRRIVRRRRQRMNGVRRLLCEFGLLPDPRPDALNQAMRRISTASAAAQVTPWTLRAAAHQRLLSNEELAVVLGHIARHRGFRSNAKNEAGANAADETSKMKKAMEATREGLAKYHAFGDMIANDPKFANRKRNRDKDYSHTAKRSDLEDEVRAILRAQLRFGSAAATETLAQTFADVAFFQRPLQDSEDRVGDCPFEPGQKRAARRAPSFELFRFLSRLANLKLAVGRSPERRLTAEEIALAAKGFGETKKTITFKSLREALDLDPNARFSGIGKDKEASLDVVARTGGAAYGTKTLKDALGDAPWRSLSRTPETLDRIAEILSFREDITSIRNGLEDLGLDSLVVEALMQAAANGDFKEFTRAGHISARAARNIIPGLREGLVYSEACARVGYDHAARLSVPLDQVGSPVTRKALSEALKQVRAVAREYGPIDYFHIELARSVGKSAEERKQLTDGIEARNVEKAKRRKQAEEHLGRAPSDDELLRYELAKEQNFKCIYSGDAIDPAGVAANDTRYQVDHILPWSRFGDDSYLNKTLCTARSNQNKRGRTPFEWFEADKTDVEWMEYVARVENLQEVKGRKKRNYSIKDAAAIEDKFKARNLTDTQWATRLLADELSRMFPPRECERAICGRADGGNDGLTIVEERRVFTRPGAITSKLRRAWGLEGLKKQDGKRVEDDRHHAVDALVLAATTESLLQRLTVEVQRREREGRPDDIFHCAEPWRGFRADVRRTVYGSETMPGIFVSRAERRRARGKAHDATIKQIREIEGERLVFERKPVEKLTDKDLEKIPIPKPYGQVSDPKRLRDELVESLRAWIAAGKPKDRPPLSPKGDVIRKVRIQTNDKVSVEINGGTVDRGDMARVDVFRKKNKKAVWEYYVVPIYPHQIVALNDPPDRAVIAYAEDKDWKEIDSSYEFLWSLFGLSYVEISKANGECIDGYFRGLHRGTGAASVCKHISLGKDATVSGIGLKTLASFKKFTIDRLGRKFEIPREVRTWRGEACT

SEQ ID NO: 37 - protein, 1149 aa, Lactobacillus salivarius
MERYHIGLDIGTSSIGWAVIGDDFKIKRKKGKNLIGVRLFKEGDTAAERRGFRTQRRRLNRRKWRLKLLEEIFDPYMAEVDKYFFARLKESNLSPKDSNKKYLGSLLFPDISDSNFYDKYPTIYHLRRDLMEKDKKFDLREIYLAIHHIVKYRGNFLEKVPAKNYKNSGASIGFLLEEVNDLYGNIIGNEDVAILDNDKFEDVEKIILNDEIRNIDKQKNVGRLLVKDKKEKNIVTAFSKAIFGYKFNLEDLLLIESDEKNKLTFNDENIDDIFNELSHSLNDNQMDLLTKTREIYFKFKLNMIVPTGYTISESMIEKYEMHKAHLKMYKEFINTLNAKDRKILKNAYSDYINNEKAKAANAQENFYKTVKKTIKENDSDTAKKIIGLIDEGNFMPKQRTGENGVIPHQLHQIELDRIIENQAKYYPWLAEENPVEKNRKFAKYKLDELVTFRVPYYVGPLIDKTESNKNEKETKFAWMVRKAKGTITPWNFENLVDRTESANRFIKRMTSKDTYIIGEDVLPASSLLYEKYKVLNELNNIKVNKKKLDVEQKQHVYLDLFTTRKNVTKDDLATSLNCDVESITGLTDNKKFNSSLSSYIDLKAILGNIVDDYSKNEDLEKIIEYSTIFEDGNIYKEKLSEISWLTDEQIEKLSNIHFKGWGRLSKKLLTQITNENGERIIDTLWNTSNNFIQVISDESIQAKLAEINGEYANKYNLEDILDEAYTSPQNKKAIRQVMKVVEDIEKAMKCEPTSIAIEFTREKRKSKLTNTRYKKISETYEKITDELISEYELGKLQSELDSKVNNMRDRYYLYFMQLGRDMYTGEKMNIDELHQKYDIDHILPQSFIKDDSLNNRVLTSKSVNIKEKSDKTAADLYAAKMGDFWRKLRKQGLMTEQKYKNLLTRTDSINKYTKQSFIKRQLVETSQVVKLAANILQDKYRNTKIIEIRARLNSDLRKKYELIKNREVNDYHHAIDGYLTTFVGQYLYKVYPKLRSYFVYDDFKKLDSNYLKHMDKFNFIWKLEDKKAEDVYDKVNDEFVLNVPEMKEYIRKIYNYKYMLVSKEVTTKNGAFYDQTKYNAKTINLIPIKKDKPTNIYGGYKGKVSSYMMLVKIQKKKEVIYKFVGVPRLWTDELDRLIDTDEKKALLKK

SEQ ID NO: 38 - protein, 1064 aa, Rhodopseudomonas palustris
MSECVTRRILGIDLGIASCGWGVIEVGEASGSIIASGVRCFDAPLIDKTGEPKSATRRTARGQRRIIRRRRQRMNAVRRLLAEFGVLTGRSPDALHQALLRLSQSVAGSQVTPWTLRAAAHERKLTNDELAVVLGHIARHRGFRSNSKNDGGANAADETSKMKKAMETTREGLARYHSFGAMIASDPKFADRKRNRDKDYSHTAKRSDLEDEVRTIFRSQTRFGSLVASEKLSQAFADAAFFQRPLQDSEDMVGSCPFEPGQKRTARRAPSFELFRFLSRLANLKLTVGRAPERRLTPDEIALAAKGFGETKKSITFKSLREALDLDPNARFSGVAKEKESTLDVAARTGGAAYGTKTLKDALGDAPWRSLSRMPEKLDRIAEILSFREDMKAIRNGLEEVGLDGLVVDALMQATANGDFKDFTRAAHISALAARNIIPGLREGLVYSDACTRVGYDHAARPAVPLSQIGSPVTRKALSEALKQVRAVAREYGPIDYFHIELARSIGKSAEERKKLTDGIEARNVEKEKRRKEAAEHLGRAPSDDELLRYELAKEQNFKCIYSGDPIDPAGISANDTRYQVDHILPWSRFGDDSYVNKTLCTARSNQNKRGRTPFEWFDADKTEAEWMEYSARVEDLKEVKGRKKRNYSIKDAASVEDKFKARNLTDTQWATRLLADELKRMFPPRECERVVTVRADGGNDGLSIVEERRVFTRPGAITSKLRRAWGLEGLKKQDGKRVEDDRHHAVDALVLAATTESLLNRLTVEVQQREREGRQDDIFHCSQPWPGFRVDVQRTVYGSETMPGIFVSRAERRRARGKAHDATVKQIRDIDGERIVFERKPIEKLTDKDLERIPVPEPYGKAADPKKLRDELVENLRAWIAAGKPKDKPPRSPKGDIIRKVRIETKDKVAVEINGGTVDRGDMARVDVFRKKNKKGVWEFYVIPIYPHQIVASALPPNRAVIAYKAESEWTAIDGCFEFAWSLNPMSYLELVKSNGELIEGYFRSMDRTTGAINLSPMSTNSETIRSIGVKTLSSFRKFTVDRLGRKFEIPREVRTWRGEACT

SEQ ID NO: 39 - protein, 1166 aa, Nitrobacter hamburgensis
MHVEIDFPHFSRGDSHLAMNKNEILRGSSVLYRLGLDLGSNSLGWFVTHLEKRGDRHEPVALGPGGVRIFPDGRDPQSGTSNAVDRRMARGARKRRDRFVERRKELIAALIKYNLLPDDARERRALEVLDPYALRKTALTDTLPAHHVGRALFHLNQRRGFQSNRKTDSKQSEDGAIKQAASRLATDKGNETLGVFFADMHLRKSYEDRQTAIRAELVRLGKDHLTGNARKKIWAKVRKRLFGDEVLPRADAPHGVRARATITGTKASYDYYPTRDMLRDEFNAIWAGQSAHHATITDEARTEIEHIIFYQRPLKPAIVGKCTLDPATRPFKEDPEGYRAPWSHPLAQRFRILSEARNLEIRDTGKGSRRLTKEQSDLVVAALLANREVKFDKLRTLLKLPAEARFNLESDRRAALDGDQTAARLSDKKGFNKAWRGFPPERQIAIVARLEETEDENELIAWLEKECALDGAAAARVANTTLPDGHCRLGLRAIKKIVPIMQDGLDEDGVAGAGYHIAAKRAGYDHAKLPTGEQLGRLPYYGQWLQDAVVGSGDARDQKEKQYGQFPNPTVHIGLGQLRRVVNDLIDKYGPPTEISIEFTRALKLSEQQKAERQREQRRNQDKNKARAEELAKFGRPANPRNLLKMRLWEELAHDPLDRKCVYTGEQISIERLLSDEVDIDHILPVAMTLDDSPANKIICMRYANRHKRKQTPSEAFGSSPTLQGHRYNWDDIAARATGLPRNKRWRFDANAREEFDKRGGFLARQLNETGWLARLAKQYLGAVTDPNQIWVVPGRLTSMLRGKWGLNGLLPSDNYAGVQDKAEEFLASTDDMEFSGVKNRADHRHHAIDGLVTALTDRSLLWKMANAYDEEHEKFVIEPPWPTMRDDLKAALEKMVVSHKPDHGIEGKLHEDSAYGFVKPLDATGLKEEEAGNLVYRKAIESLNENEVDRIRDIQLRTIVRDHVNVEKTKGVALADALRQLQAPSDDYPQFKHGLRHVRILKKEKGDYLVPIANRASGVAYKAYSAGENFCVEVFETAGGKWDGEAVRRFDANKKNAGPKIAHAPQWRDANEGAKLVMRIHKGDLIRLDHEGRARIMVVHRLDAAAGRFKLADHNETGNLDKRHATNNDIDPFRWLMASYNTLKKLAAVPVRVDELGRVWRVMPN

SEQ ID NO: 40 - protein, 641 aa, Nitrobacter hamburgensis
MHKRNSRSYRLGLDLGSNSLGWFVTHLEKRGDRYEPVALDPGGVRIFPDGRDPQSGMSNAVDRRMARGARKRRDRFVDPYALRKAALTNALPAHRVGRAIFHLNQRRGFQSNRKTDRKQSEDGAIKQAASKLKARMHEEAAPTLGAFFADMHLRKSYDDQQTAIRAELVRLGKDHLTGNARKKVWAKVRKRLFGDEVLRPKDTSDGARARATTTGTKASYDFYPTRAMLLDEFNAIWAAQREHHLAMTDEAKAEIEHIIFYHRPLKPAIVGKCTLDPATRPFKEDPEGYRAPWSHPLAQRFRILSEARNLEIRETGKTSRRLTKDQSDLVVAALLANREVKFDKLRTLLKLPAEARFNLESDRRSTATRPPHGCRTRRASIRRGAGFLRNGRSRSSPDWKKPKTKTNCSHGSKWNAHLTAQRPRASPIRRCRTAIAGSACAQSKRSCRSCRTSSMRMALRAPAITSWPSVPATTIPVDTFQQGGNAFGRILSVVTIELFAITDRVDPVQEQDARCFALRIAECRSDGLQHFAEVSLGLPPRNAAQDQRHSAGLCQSSCVGRFVPGTPCRRTPRSTSLHGKEPSAHAFGSTARSRPQLPASPRPCMSFRDGTSSSPARMPETLDRCAISRSNRSSVCRAERL

SEQ ID NO: 41 - protein, 1368 aa, Streptococcus pyogenes
MDKKYSIGLDIGTNSVGWAVITDDYKVPSKKFKVLGNTDRHSIKKNLIGALLFDSGEIAEATRLKRTARRRYTRRKNRICYLQEIFSNEMAKVDDSFFHRLEESFLVEEDKKHERHPIFGNIVDEVAYHEKYPTIYHLRKKLVDSTDKADLRLIYLALAHMIKFRGHFLIEGDLNPDNSDVDKLFIQLVQTYNQLFEENPINASGVDAKAILSARLSKSRRLENLIAQLPGEKKNGLFGNLIALSLGLTPNFKSNFDLAEDAKLQLSKDTYDDDLDNLLAQIGDQYADLFLAAKNLSDAILLSDILRLNSEITKAPLSASMIKRYDEHHQDLTLLKALVRQQLPEKYKEIFFDQSKNGYAGYIDGGASQEEFYKFIKPILEKMDGTEELLAKLNREDLLRKQRTFDNGSIPHQIHLGELHAILRRQEDFYPFLKDNREKIEKILTFRIPYYVGPLARGNSRFAWMTRKSEETITPWNFEEVVDKGASAQSFIERMTNFDKNLPNEKVLPKHSLLYEYFTVYNELTKVKYVTEGMRKPAFLSGEQKKAIVDLLFKTNRKVTVKQLKEDYFKKIECFDSVEISGVEDRFNASLGTYHDLLKIIKDKDFLDNEENEDILEDIVLTLTLFEDREMIEERLKTYAHLFDDKVMKQLKRRRYTVWGRLSRKLINGIRDKQSGKTILDFLKSDGFANRNFMQLIHDDSLTFKEDIQKAQVSGQGDSLHEHIANLAGSPAIKKGILQTVKVVDELVKVMGRHKPENIVIEMARENQTTQKGQKNSRERMKRIEEGIKELGSQILKEHPVENTQLQNEKLYLYYLQNGRDMYVDQELDINRLSDYDVDHIVPQSFIKDDSIDNKVLTRSDKNRGKSDNVPSEEVVKKMKNYWRQLLNAKLITQRKFDNLTKAERGGLSELDKAGFIKRQLVETRQITKHVAQILDSRMNTKYDENDKLIREVKVITLKSKLVSDFRKDFQFYKVREINNYHHAHDAYLNAVVGTALIKKYPKLESEFVYGDYKVYDVRKMLAKSEQEIGKATAKYFFYSNIMNFFKTEITLANGEIRKRPLIETNGETGEIVWDKGRDFATVRKVLSMPQVNIVKKTEVQTGGFSKESILPKRNSDKLIARKKDWDPKKYGGFDSPTVAYSVLVVAKVEKGKSKKLKSVKELLGITIMERSSFEKNPIDFLEAKGYKEVRKDLIIKLPKYSLFELENGRKRMLASAGELQKGNELALPSKYVNFLYLASHYEKLKGSPEDNEQKQLFVEQHKHYLDEIIEQISEFSKRVILADANLDKVLSAYNKHRDKPIREQAENIIHLFTLTNLGAPTAFKYFDTTIDRKRYTSTKEVLDATFIHQSITGLYETRIDLSQLGGD

SEQ ID NO: 42 - protein, 1368 aa, Streptococcus pyogenes
MDKKYSIGLDIGTNSVGWAVITDDYKVPSKKFKVLGNTDRHSIKKNLIGALLFDSGETAEATRLKRTARRRYTRRKNRICYLQEIFSNEMAKVDDSFFHRLEESFLVEEDKKHERHPIFGNIVDEVAYHEKYPTIYHLRKKLVDSTDKADLRLIYLALAHMIKFRGHFLIEGDLNPDNSDVDKLFIQLVQTYNQLFEENPINASGVDAKAILSARLSKSRRLENLIAQLPGEKKNGLFGNLIALSLGLTPNFKSNFDLAEDAKLQLSKDTYDDDLDNLLAQIGDQYADLFLAAKNLSDAILLSDILRLNSEITKAPLSASMIKRYDEHHQDLTLLKALVRQQLPEKYKEIFFDQSKNGYAGYIDGGASQEEFYKFIKPILEKMDGTEELLAKLNREDLLRKQRTFDNGSIPHQIHLGELHAILRRQEDFYPFLKDNREKIEKILTFRIPYYVGPLARGNSRFAWMTRKSEETITPWNFEEVVDKGASAQSFIERMTNFDKNLPNEKVLPKHSLLYEYFTVYNELTKVKYVTEGMRKPAFLSGEQKKAIVDLLFKTNRKVTVKQLKEDYFKKIECFDSVEISGVEDRFNASLGTYHDLLKIIKDKDFLDNEENEDILEDIVLTLTLFEDREMIEERLKTYAHLFDDKVMKQLKRRRYTGWGRLSRKLINGIRDKQSGKTILDFLKSDGFANRNFMQLIHDDSLTFKEDIQKAQVSGQGDSLHEHIANLAGSPAIKKGILQTVKVVDELVKVMGRHKPENIVIEMARENQTTQKGQKNSRERMKRIEEGIKELGSQILKEHPVENTQLQNEKLYLYYLQNGRDMYVDQELDINRLSDYDVDHIVPQSFIKDDSIDNKVLTRSDKNRGKSDNVPSEEVVKKMKNYWRQLLNAKLITQRKFDNLTKAERGGLSELDKAGFIKRQLVETRQITKHVAQILDSRMNTKYDENDKLIREVKVITLKSKLVSDFRKDFQFYKVREINNYHHAHDAYLNAVVGTALIKKYPKLESEFVYGDYKVYDVRKMIAKSEQEIGKATAKYFFYSNIMNFFKTEITLANGEIRKRPLIETNGETGEIVWDKGRDFATVRKVLSMPQVNIVKKTEVQTGGFSKESILPKRNSDKLIARKKDWDPKKYGGFDSPTVAYSVLVVAKVEKGKSKKLKSVKELLGLTIMERSSFEKNPIDFLEAKGYKEVKKDLIIKLPKYSLFELENGRKRMLASAGELQKGNELALPSKYVNFLYLASHYEKLKGSPEDNEQKQLFVEQHKHYLDEIIEQISEFSKRVILADANLDKVLSAYNKHRDKPIREQAENIIHLFTLTNLGAPAAFKYFDTTIDRKRYTSTKEVLDATLIHQSITGLYETRIDLSQLGGD

SEQ ID NO: 43 - protein, 1368 aa, Streptococcus pyogenes
MDKKYSIGLDIGTNSVGWAVITDDYKVPSKKFKVLGNTDRHSIKKNLIGALLFDSGEIAEATRLKRTARRRYTRRKNRICYLQEIFSNEMAKVDDSFFHRLEESFLVEEDKKHERHPIFGNIVDEVAYHEKYPTIYHLRKKLVDSTDKADLRLIYLALAHMIKFRGHFLIEGDLNPDNSDVDKLFIQLVQTYNQLFEENPINASGVDAKAILSARLSKSRRLENLIAQLPGEKKNGLFGNLIALSLGLTPNFKSNFDLAEDAKLQLSKDTYDDDLDNLLAQIGDQYADLFLAAKNLSDAILLSDILRLNSEITKAPLSASMIKRYDEHHQDLTLLKALVRQQLPEKYKEIFFDQSKNGYAGYIDGGASQEEFYKFIKPILEKMDGTEELLAKLNREDLLRKQRTFDNGSIPHQIHLGELHAILRRQEDFYPFLKDNREKIEKILTFRIPYYVGPLARGNSRFAWMTRKSEETITPWNFEEVVDKGASAQSFIERMTNFDKNLPNEKVLPKHSLLYEYFTVYNELTKVKYVTEGMRKPAFLSGEQKKAIVDLLFKTNRKVTVKQLKEDYFKKIECFDSVEISGVEDRFNASLGTYHDLLKIIKDKDFLDNEENEDILEDIVLTLTLFEDREMIEERLKTYAHLFDDKVMKQLKRRRYTGWGRLSRKLINGIRDKQSGKTILDFLKSDGFANRNFMQLIHDDSLTFKEDIQKAQVSGQGDSLHEHIANLAGSPAIKKGILQTVKVVDELVKVMGRHKPENIVIEMARENQTTQKGQKNSRERMKRIEEGIKELGSQILKEHPVENTQLQNEKLYLYYLQNGRDMYVDQELDINRLSDYDVDHIVPQSFIKDDSIDNKVLTRSDKNRGKSDNVPSEEVVKKMKNYWRQLLNAKLITQRKFDNLTKAERGGLSELDKAGFIKRQLVETRQITKHVAQILDSRMNTKYDENDKLIREVKVITLKSKLVSDFRKDFQFYKVREINNYHHAHDAYLNAVVGTALIKKYPKLESEFVYGDYKVYDVRKMLAKSEQEIGKATAKYFFYSNIMNFFKTEITLANGEIRKRPLIETNGETGEIVWDKGRDFATVRKVLSMPQVNIVKKTEVQTGGFSKESILPKRNSDKLIARKKDWDPKKYGGFDSPTVAYSVLVVAKVEKGKSKKLKSVKELLGITIMERSSFEKNPIDFLEAKGYKEVRKDLIIKLPKYSLFELENGRKRMLASAGELQKGNELALPSKYVNFLYLASHYEKLKGSPEDNEQKQLFVEQHKHYLDEIIEQISEFSKRVILADANLDKVLSAYNKHRDKPIREQAENIIHLFTLTNLGAPTAFKYFDTTIDRKRYTSTKEVLDATFIHQSITGLYETRIDLSQLGGD

SEQ ID NO: 44 - protein, 1371 aa, Streptococcus pyogenes
MDKKYSIGLDIGTNSVGWAVITDDYKVPSKKFKVLGNTDRHSIKKNLIGALLFDSGETAEATRLKRTARRRYTRRKNRICYLQEIFSNEMAKVDDSFFHRLEESFLVEEDKKHERHPIFGNIVDEVAYHEKYPTIYHLRKKLADSTDKADLRLIYLALAHMIKFRGHFLIEGDLNPDNSDVDKLFIQLVQTYNQLFEENPINASRVDAKAILSARLSKSRRLENLIAQLPGEKKNGLFGNLIALSLGLTPNFKSNFDLAEDAKLQLSKDTYDDDLDNLLAQIGDQYADLFLAAKNLSDATLLSDILRVNSEITKAPLSASMIKRYDEHHQDLTLLKALVRQQLPEKYKEIFFDQSKNGYAGYIDGGASQEEFYKFIKPILEKMDGTEELLAKLNREDLLRKQRTFDNGSIPHQIHLGELHAILRRQEDFYPFLKDNREKIEKILTFRIPYYVGPLARGNSRFAWMTRKSEETITPWNFEEVVDKGASAQSFIERMTNFDKNLPNEKVLPKHSLLYEYFTVYNELTKVKYVTEGMRKPAFLSGEQKKAIVDLLFKTNRKVTVKQLKEDYFKKIECFDSVEISGVEDRFNASLGTYHDLLKIIKDKDFLDNEENEDILEDIVLTLTLFEDKEMIEERLKTYAHLFDDKVMKQLKRRHYTGWGRLSRKLINGIRDKQSGKTILDFLKSDGFANRNFIQLIHDDSLTFKEAIQKAQVSGQGHSLHEQIANLAGSPAIKKGILQSVKVVDELVKVMGHKPENIVIEMARENQTTQKGQKNSRERMKRIEEGIKELGSQILKEHPVENTQLQNEKLYLYYLQNGRDMYVDQELDINRLSDYDVDHIVPQSFIKDDSIDNKVLTRSDKNRGKSDDVPSEEVVKKMKNYWRQLLNAKLITQRKFDNLTKAERGGLSELDKAGFIKRQLVETRQITKHVAQILDSRMNTKYDENDKLIREVKVITLKSKLVSDFRKDFQFYKVREINNYHHAHDAYLNAVVGTALIKKYPKLESEFVYGDYKVYDVRKMIAKSEQEIGKATAKRFFYSNIMNFFKTEITLANGEIRKRPLIETNEETGEIVWDKGRDFATVRKVLSMPQVNIVKKTEVQTGALTNESIYARGSFDKLISRKHRFESSKYGGFGSPTVTYSVLVVAKSKVQDGKVKKIKTGKELIGITLLDKLVFEKNPLKFIEDKGYGNVQIDKCIKLPKYSLFEFENGTRRMLASVMANNNSRGDLQKANEMFLPAKLVTLLYHAHKIESSKELEHEAYILDHYNDLYQLLSYIERFASLYVDVEKNISKVKELFSNIESYSISEICSSVINLLTLTASGAPADFKFLGTTIPRKRYGSPQSILSSTLIHQSITGLYETRIDLSQLGSD

SEQ ID NO: 45 - protein, 1121 aa, Streptococcus thermophilus
MSDLVLGLDIGIGSVGVGILNKVTGEIIHKNSRIFPAAQAENNLVRRTNRQGRRLARRKKHRRVRLNRLFEESGLITDFTKISINLNPYQLRVKGLTDELSNEELFIALKNMVKHRGISYLDDASDDGNSSVGDYAQIVKENSKQLETKTPGQIQLERYQTYGQLRGDFTVEKDGKKHRLINVFPTSAYRSEALRILQTQQEFNPQITDEFINRYLEILTGKRKYYHGPGNEKSRTDYGRYRTSGETLDNIFGILIGKCTFYPDEFRAAKASYTAQEFNLLNDLNNLTVPTETKKLSKEQKNQIINYVKNEKAMGPAKLFKYIAKLLSCDVADIKGYRIDKSGKAEIHTFEAYRKMKTLETLDIEQMDRETLDKLAYVLTLNTEREGIQEALEHEFADGSFSQKQVDELVQFRKANSSIFGKGWHNFSVKLMMELIPELYETSEEQMTILTRLGKQKTTSSSNKTKYIDEKLLTEEIYNPVVAKSVRQAIKIVNAAIKEYGDFDNIVIEMARETNEDDEKKAIQKIQKANKDEKDAAMLKAANQYNGKAELPHSVFHGHKQLATKIRLWHQQGERCLYTGKTISIHDLINNSNQFEVDHILPLSITFDDSLANKVLVYATANQEKGQRTPYQALDSMDDAWSFRELKAFVRESKTLSNKKKEYLLTEEDISKFDVRKKFIERNLVDTRYASRVVLNALQEHFRAHKIDTKVSVVRGQFTSQLRRHWGIEKTRDTYHHHAVDALIIAASSQLNLWKKQKNTLVSYSEDQLLDIETGELISDDEYKESVFKAPYQHFVDTLKSKEFEDSILFSYQVDSKFNRKISDATIYATRQAKVGKDKADETYVLGKIKDIYTQDGYDAFMKIYKKDKSKFLMYRHDPQTFEKVIEPILENYPNKQINEKGKEVPCNPFLKYKEEHGYIRKYSKKGNGPEIKSLKYYDSKLGNHIDITPKDSNNKVVLQSVSPWRADVYFNKTTGKYEILGLKYADLQFEKGTGTYKISQEKYNDIKKKEGVDSDSEFKFTLYKNDLLLVKDTETKEQQLFRFLSRTMPKQKHYVELKPYDKQKFEGGEALIKVLGNVANSGQCKKGLGKSNISIYKVRTDVLGNQHIIKNEGDKPKLDF

SEQ ID NO: 46 - protein, 1388 aa, Streptococcus thermophilus
MTKPYSIGLDIGTNSVGWAVTTDNYKVPSKKMKVLGNTSKKYIKKNLLGVLLFDSGITAEGRRLKRTARRRYTRRRNRILYLQEIFSTEMATLDDAFFQRLDDSFLVPDDKRDSKYPIFGNLVEEKAYHDEFPTIYHLRKYLADSTKKADLRLVYLALAHMIKYRGHFLIEGEFNSKNNDIQKNFQDFLDTYNAIFESDLSLENSKQLEEIVKDKISKLEKKDRILKLFPGEKNSGIFSEFLKLIVGNQADFRKCFNLDEKASLHFSKESYDEDLETLLGYIGDDYSDVFLKAKKLYDAILLSGFLTVTDNETEAPLSSAMIKRYNEHKEDLALLKEYIRNISLKTYNEVFKDDTKNGYAGYIDGKTNQEDFYVYLKKLLAEFEGADYFLEKIDREDFLRKQRTFDNGSIPYQIHLQEMRAILDKQAKFYPFLAKNKERIEKILTFRIPYYVGPLARGNSDFAWSIRKRNEKITPWNFEDVIDKESSAEAFINRMTSFDLYLPEEKVLPKHSLLYETFNVYNELTKVRFIAESMRDYQFLDSKQKKDIVRLYFKDKRKVTDKDIIEYLHAIYGYDGIELKGIEKQFNSSLSTYHDLLNIINDKEFLDDSSNEAIIEEIIHTLTIFEDREMIKQRLSKFENIFDKSVLKKLSRRHYTGWGKLSAKLINGIRDEKSGNTILDYLIDDGISNRNFMQLIHDDALSFKKKIQKAQIIGDEDKGNIKEVVKSLPGSPAIKKGILQSIKIVDELVKVMGGRKPESIVVEMARENQYTNQGKSNSQQRLKRLEKSLKELGSKILKENIPAKLSKIDNNALQNDRLYLYYLQNGKDMYTGDDLDIDRLSNYDIDHIIPQAFLKDNSIDNKVLVSSASNRGKSDDVPSLEVVKKRKTFWYQLLKSKLISQRKFDNLTKAERGGLSPEDKAGFIQRQLVETRQITKHVARLLDEKFNNKKDENNRAVRTVKIITLKSTLVSQFRKDFELYKVREINDFHHAHDAYLNAVVASALLKKYPKLEPEFVYGDYPKYNSFRERKSATEKVYFYSNIMNIFKKSISLADGRVIERPLIEVNEETGESVWNKESDLATVRRVLSYPQVNVVKKVEEQNHGLDRGKPKGLFNANLSSKPKPNSNENLVGAKEYLDPKKYGGYAGISNSFTVLVKGTIEKGAKKKITNVLEFQGISILDRINYRKDKLNFLLEKGYKDIELIIELPKYSLFELSDGSRRMLASILSTNNKRGEIHKGNQIFLSQKFVKLLYHAKRISNTINENHRKYVENHKKEFEELFYYILEFNENYVGAKKNGKLLNSAFQSWQNHSIDELCSSFIGPTGSERKGLFELTSRGSAADFEFLGVKIPRYRDYTPSSLLKDATLIHQSVTGLYETRIDLAKLGEG

SEQ ID NO: 47 - protein, 1138 aa, Acidothermus cellulolyticus
MGGSEVGTVPVTWRLGVDVGERSIGLAAVSYEEDKPKEILAAVSWIHDGGVGDERSGASRLALRGMARRARRLRRFRRARLRDLDMLLSELGWTPLPDKNVSPVDAWLARKRLAEEYVVDETERRRLLGYAVSHMARHRGWRNPWTTIKDLKNLPQPSDSWERTRESLEARYSVSLEPGTVGQWAGYLLQRAPGIRLNPTQQSAGRRAELSNATAFETRLRQEDVLWELRCIADVQGLPEDVVSNVIDAVFCQKRPSVPAERIGRDPLDPSQLRASRACLEFQEYRIVAAVANLRIRDGSGSRPLSLEERNAVIEALLAQTERSLTWSDIALEILKLPNESDLTSVPEEDGPSSLAYSQFAPFDETSARIAEFIAKNRRKIPTFAQWWQEQDRTSRSDLVAALADNSIAGEEEQELLVHLPDAELEALEGLALPSGRVAYSRLTLSGLTRVMRDDGVDVHNARKTCFGVDDNWRPPLPALHEATGHPVVDRNLAILRKFLSSATMRWGPPQSIVVELARGASESRERQAEEEAARRAHRKANDRIRAELRASGLSDPSPADLVRARLLELYDCHCMYCGAPISWENSELDHIVPRTDGGSNRHENLAITCGACNKEKGRRPFASWAETSNRVQLRDVIDRVQKLKYSGNMYWTRDEFSRYKKSVVARLKRRTSDPEVIQSIESTGYAAVALRDRLLSYGEKNGVAQVAVFRGGVTAEARRWLDISIERLFSRVAIFAQSTSTKRLDRRHHAVDAVVLTTLTPGVAKTLADARSRRVSAEFWRRPSDVNRHSTEEPQSPAYRQWKESCSGLGDLLISTAARDSIAVAAPLRLRPTGALHEETLRAFSEHTVGAAWKGAELRRIVEPEVYAAFLALTDPGGRFLKVSPSEDVLPADENRHIVLSDRVLGPRDRVKLFPDDRGSIRVRGGAAYIASFHHARVFRWGSSHSPSFALLRVSLADLAVAGLLRDGVDVFTAELPPWTPAWRYASIALVKAVESGDAKQVGWLVPGDELDFGPEGVTTAAGDLSMFLKYFPERHWVVTGFEDDKRINLKPAFLSAEQAEVLRTERSDRPDTLTEAGEILAQFFPRCWRATVAKVLCHPGLTVIRRTALGQPRWRRGHLPYSWRPWSADPWSGGTP

SEQ ID NO: 48 - protein, 1629 aa, Francisella novicida
MNFKILPIAIDLGVKNTGVFSAFYQKGTSLERLDNKNGKVYELSKDSYTLLMNNRTARRHQRRGIDRKQLVKRLFKLIWTEQLNLEWDKDTQQAISFLFNRRGFSFITDGYSPEYLNIVPEQVKAILMDIFDDYNGEDDLDSYLKLATEQESKISEIYNKLMQKILEFKLMKLCTDIKDDKVSTKTLKEITSYEFELLADYLANYSESLKTQKFSYTDKQGNLKELSYYHHDKYNIQEFLKRHATINDRILDTLLTDDLDIWNFNFEKFDFDKNEEKLQNQEDKDHIQAHLHHFVFAVNKIKSEMASGGRHRSQYFQEITNVLDENNHQEGYLKNFCENLHNKKYSNLSVKNLVNLIGNLSNLELKPLRKYFNDKIHAKADHWDEQKFTETYCHWILGEWRVGVKDQDKKDGAKYSYKDLCNELKQKVTKAGLVDFLLELDPCRTIPPYLDNNNRKPPKCQSLILNPKFLDNQYPNWQQYLQELKKLQSIQNYLDSFETDLKVLKSSKDQPYFVEYKSSNQQIASGQRDYKDLDARILQFIFDRVKASDELLLNEIYFQAKKLKQKASSELEKLESSKKLDEVIANSQLSQILKSQHTNGIFEQGTFLHLVCKYYKQRQRARDSRLYIMPEYRYDKKLHKYNNTGRFDDDNQLLTYCNHKPRQKRYQLLNDLAGVLQVSPNFLKDKIGSDDDLFISKWLVEHIRGFKKACEDSLKIQKDNRGLLNHKINIARNTKGKCEKEIFNLICKIEGSEDKKGNYKHGLAYELGVLLFGEPNEASKPEFDRKIKKFNSIYSFAQIQQIAFAERKGNANTCAVCSADNAHRMQQIKITEPVEDNKDKIILSAKAQRLPAIPTRIVDGAVKKMATILAKNIVDDNWQNIKQVLSAKHQLHIPIITESNAFEFEPALADVKGKSLKDRRKKALERISPENIFKDKNNRIKEFAKGISAYSGANLTDGDFDGAKEELDHIIPRSHKKYGTLNDEANLICVTRGDNKNKGNRIFCLRDLADNYKLKQFETTDDLEIEKKIADTIWDANKKDFKFGNYRSFINLTPQEQKAFRHALFLADENPIKQAVIRAINNRNRTFVNGTQRYFAEVLANNIYLRAKKENLNTDKISFDYFGIPTIGNGRGIAEIRQLYEKVDSDIQAYAKGDKPQASYSHLIDAMLAFCIAADEHRNDGSIGLEIDKNYSLYPLDKNTGEVFTKDIFSQIKITDNEFSDKKLVRKKAIEGFNTHRQMTRDGIYAENYLPILIHKELNEVRKGYTWKNSEEIKIFKGKKYDIQQLNNLVYCLKFVDKPISIDIQISTLEELRNILTTNNIAATAEYYYINLKTQKLHEYYIENYNTALGYKKYSKEMEFLRSLAYRSERVKIKSIDDVKQVLDKDSNFIIGKITLPFKKEWQRLYREWQNTTIKDDYEFLKSFFNVKSITKLHKKVRKDFSLPISTNEGKFLVKRKTWDNNFIYQILNDSDSRADGTKPFIPAFDISKNEIVEAIIDSFTSKNIFWLPKNIELQKVDNKNIFAIDTSKWFEVETPSDLRDIGIATIQYKIDNNSRPKVRVKLDYVIDDDSKINYFMNHSLLKSRYPDKVLEILKQSTIIEFESSGFNKTIKEMLGMKLAGIYNETSNN

SEQ ID NO: 49 - protein, 1068 aa, Verminephrobacter eiseniae
MNKAVAYRLALDLGSTSLGWAIFRLNEAREPTAIIRAGVRIFSDGRNANSEPLAVHRRVARAMRRRRDRLLKRKKRMHDQLVQHGFFPAEVAERKELERLNPYQLRAKGLHEALTPGEFARALFHINQRRGFKSNRKTDRKDNDSGALKQAISELRKRIQDSDCATAGEWFWKERMQQKPEGVRGQWVRARYRKTPSTTDEGKKRIGYDLYVDRAMVEQEFDALWAAQAALQPGLFTEAARAELKDTLLYQRDLRPVKPGRCTLLPAEERAPLALPSTQRFRILQEVNNLRLLDEALREVPLNLAQRDAVVSALEGKKELSFAAIRKLLTLSGKFNLEDEKRAELKGNATSVILARKDLFGDAWAGFDAAVQDEIVWRLVSQESEGALIAWLQQHTGVDGVCAEAIVNTRLPDGYGRLSRKALERIVPALQREVCTYDKAVQAAGFAHHSDLGFDFDYAEDEVQQVGEHTIASTGEVQAQYAFKQLPYYGKALQRHVAFGSGDAKDHEEKCYGKIANPTVHIGLNQVRTVVNALIRRYGHPTEVVVELARDLKQSREQKQQTQREQADNQKRNEDIRKRIAPILETSPERVRDRDIKKWILWEELNKKDIADRHCPYSGERISATMLLSEAVEIEHILPFSRTLDDSLNNRTVAMRRANRIKGDRTPWEARADFEAQGWRYEAILQRAEGMPPRKRYRFAEDGYQRWLGKDRNFLARALNDTSYLSRLAANYLRLVCPQGVRVIPGQMTDKLRGKFGLNSVLGLDGKKNRNDHRHHAVDACVIGVTDQGLMQRFANASKQARENGLTRLVQDMLLPWWPSYYDHVERAVRHIRVSHRPDHGFEGAMMKGTAHGIREDGIREDGRIKQRPKAKGSADHKTITLIPIDEPRQLARHGVDAEGKPLPYKGYASGSNYCIEITKNGKGKWEGQVISTFDAYRIKAAADAAARAGQVISTVEADSIVRKSGWERLRGAQSQNGQPLVMRLVIGDSVRMEVDGRDEVMRVVKMSGKEMVFAPVREANVDKRNNMPDEQDPFTYTYKRADQLRKAKARQVTISPIGELRDPGFKG

SEQ ID NO: 50 - protein, 1125 aa, Francisella tularensis
MNVKILPIAIDLDVKNTGVFSAFYQKGTSLEKLDNKNGKVYELSKDSYTLLMNNRTARRHQRRGIDRKQLVKRLFKLVWTEQLNLEWDKDTQQAISFLFNRRGFSFITDGYSTEYLNIVPEQVKAILMDIFDDYNGEDDLDSYLKLATEQESKISEIYNKLMQKILEFKLRKLCTDIKDDKVSTKTLKEITSYEFELLADYLANYSESLKIQKFSYTDKQGNLKELSYYHHDKYNIQEFLKRHATINDEILDTLLTDDFDIWNFNFEKFDFDKNEEKLQNQEDKDHTQAHLHHFVFAVNKIKSEMASGGRHRSQYFQEITNVLDENNHQEGYLKNFCENLHNKKYSNLSVKNLVNLVGNLSNLELKPLRKYFNDKIHAKADHWDEQKFTETYCHWILGEWRVGVKDQDKKDGAKYSYKDLCNELKQKVTKAGLIDFLLELDPCRTIPPYLDNNNRKPPKCQSLILNPKFLDNQYPNWQQYLQELKKLQSIQDYLDSFETDLKDLKSSKDQPYFVEYKSSNQQMASGQRDYKDLDARILQFIFDRVKASDELLLNEIYFQAKKLKQKASSELEKLESSKKLDEVIANSQLSQILKSQHTNGIFEQGTFLHLVCKYYKQRQRARDSRLYIMPEYRYDKKLDKYNNTGRFDDNNQLLTYCNHKPRQKRYQLLNDLAGVLQVSRNQLLSSVEEWFQQAQRVGEISKSQDEQIFEWLKSFKIASYCKAAVEMQKQYRGTLKNAIQTAIFRQSENINKNKNKNTGNQQQALSENSKDVKSLTADEKKLLKLIENIAKASQKIGESLGLNDKQIKKFNSIYSFAQIQQIAFAERKGNANTCAVCSADNAHRMQQIKITELVEDNKDNIILSAKAQRLPAIPTRIVDGAVKKMATILAKNIVDDNWQNIKQVLSAKHQLHIPIITESNAFEFEPALADVKGKSLKDRRKKALERISPENIFKDKNNRIKEFAKGISAYSGANLTDGDFDGAKEELDHIIPRSHKKYGTLNDEANLICVTRDDNKNIFAIDTSKWFEIETPSDLRDIGVATIQYKIDNNSRPKVRVKLDYVIDDDSKINYFMNHSLLKSRYPDKVLEILKQSTIIEFESSGFNKTIKEMLGMTLAGIYNETSNN

SEQ ID NO: 51 - protein, 1064 aa, Unknown
  Bradyrhizobium sp.
MKRTSLRAYRLGVDLGANSLGWFVVWLDDHGQPEGLGPGGVRIFPDGRNPQSKQSNAAGRRLARSARRRRDRYLQRRGKLMGLLVKHGLMPADEPARKRLECLDPYGLRAKALDEVLPLHHVGRALFHLNQRRGLFANRAIEQGDKDASAIKAAAGRLQTSMQACGARTLGEFLNRRHQLRATVRARSPVGGDVQARYEFYPTRAMVDAEFEAIWAAQAPHHPTMTAEAHDTIREAIFSQRAMKRPSIGKCSLDPATSQDDVDGFRCAWSHPLAQRFRIWQDVRNLAVVETGPTSSRLGKEDQDKVARALLQTDQLSFDEIRGLLGLPSDARFNLESDRRDHLKGDATGAILSARRHFGPAWHDRSLDRQIDIVALLESALDEAAIIASLGTTHSLDEAAAQRALSALLPDGYCRLGLRAIKRVLPLMEAGRTYAEAASAAGYDHALLPGGKLSPTGYLPYYGQWLQNDVVGSDDERDTNERRWGRLPNPTVHIGIGQLRRVVNELIRWHGPPAEITVELTRDLKLSPRRLAELEREQAENQRKNDKRTSLLRKLGLPASTHNLLKLRLWDEQGDVASECPYTGEAIGLERLVSDDVDIDHLIPFSISWDDSAANKVVCMRYANREKGNRTPFEAFGHRQGRPYDWADIAERAARLPRGKRWRFGPGARAQFEELGDFQARLLNETSWLARVAKQYLAAVTHPHRIHVLPGRLTALLRATWELNDLLPGSDDRAAKSRKDHRHHAIDALVAALTDQALLRRMANAHDDTRRKIEVLLPWPTFRIDLETRLKAMLVSHKPDHGLQARLHEDTAYGTVEHPETEDGANLVYRKTFVDISEKEIDRIRDRRLRDLVRAHVAGERQQGKTLKAAVLSFAQRRDIAGHPNGIRHVRLTKSIKPDYLVPIRDKAGRIYKSYNAGENAFVDILQAESGRWIARATTVFQANQANESHDAPAAQPIMRVFKGDMLRIDHAGAEKFVKIVRLSPSNNLLYLVEHHQAGVFQTRHDDPEDSFRWLFASFDKLREWNAELVRIDTLGQPWRRKRGLETGSEDATRIGWTRPKKWP

SEQ ID NO: 52 - protein, 1354 aa, Flavobacterium psychrophilum
MKKILGLDLGTNSIGWAFINEAENEIEVSSIVNTGVRIVPLTTDEESDFKKGNTISINADRTLKRGARRGLQRFKQRREALLETFNRIKFIATDFVYAETGAATTFSSYQLRAKSAVEAVTKEELVKVLLMLNKKRGYKSSRKAKTAEEGDAIDGMKIAKEIFENNLTPGQWVYNSLSKGGKFIPDFYHSDLQKELEKIVRFQNQFHSEQINDKLLADIQGKSRTQTSQHFSKTLNIPLAENKGTREETKLQHYQWRNEALANELDMKILAFIITEINNQINQSSGYLGAISDRSKELYFNQETVGQYQYKQLQENVHAKLKNQVFYRQDYLDEFEKIWETQAKFHSELNEKLKAEIRDITIFYQRKLKSQKHLVSFCEFEKGHKAIPKSSPLFQEFRIWQNLNNVVVKNETTKEVFELSEELKQLIAEELQFKESMTDVQMLTFCELKKGTHTVNFKKIEGNRTNTSIYKAFEKILEVEGYEIDFSKMKPLEIKETVAPIFETLNINTVILDFDPTIQGNDFDKQPYYQLWHLLYSAEDDDKLKETLKTKFGFKENHLPFILNINLQADYGSLSAKAIKKILPHLMDGHIYDKACLMVGYNHSSSLTTAQNNDRVLKDTLELLKKNSLRNPVVEKILNQMINVINAIMKDPAMGKPDEIRVELARELKANNEQRKKATSDINTATTEHERIRKLLHSEFNIPRVTRNDIIRYKLWLETGGISLYTGNPIKASDLFSKNYDIEHIIPKSRLFDDSFSNKTLCERQLNIDKSNKTAYSFLQEKLSENDFAAYENRVKDLFKTGKIKSYTKYKKLLMADNEIPEGFIDRQLRETQYIAKKAKEILLEVSRNVTATIGSVTDKLRQDWELVDVMKELNWEKYDKLGLTHIEEGKNGERLSKIKDWTKRNDHRHHAMDAITVAFTKPAYIQYLNNLNAKTQGENKANSIIGIENKHLYRDKNNKLRFISPMKNFREEAKKQLESILISYKAKNKVVTKNKNTTKKSGGTNQKIQLTPRGRLHKETVYGKLQQYATKEEKVNASFTEDYIQKVAKKEYREALLKRLEENDNDPKKAFTGKNALNKTPIYISLKDNIIVPEKVKTVWLETDYTIRKDITPDLKIDKVIDVGIKRILQNRLNEFNGDPKKAFVNLGESPIWLNKEKGIAIKRVTISGVSNAQALHTKKDHLGNEILDKNGNPIPVDFISTGNNHHVAIYRDEKGNLQEEVVSFYDAVIRRNLGLSVINKNHEKGWEFLFSMKQNEFFIFPSDGFNPHEIDLLNPNNYHLISPNIFRVQKISTKNYMFNHHLETKAVDGEMLKSKKELSKTSYHFIQTPTNLNGIIKVRINHLGKIVHLGEY

SEQ ID NO: 53 - protein, 1062 aa, Actinobacillus succinogenes
MNLNYILGLDLGIASVGWAVVEIDEQENPQRLIDVGVRTFDRAEVLKTGESLALARRLARSSRRLVKRRAERIKKAKRLLKAENLLLSADEILPNEAWQLRVKGLDQKLERQEWAAVLLHLLKHRGYLSQRKNESKSENKELGALLSGVAINHQILQSAEYRTPAEIAVNKFQAEEGHIRNQRGAYTHTFSRLDLLAEMELLFQRQATLGNPHTSTKLLENLTALLMWQKPALAGEAILKMLGKCTFEPTEYKAAKNSYSAERFVWLTKLNNLRILEQGAERALTDNERFALLDQPYEKAKLTYAQVRTLLGLSDEAIFKGLRYQGEDKKAVETKTTLMEVKAYHQIRKALEGLDLKAEWNELKNNPALLDEIGTAFSLYKTDDDIHRYLDGKLSESVLNALLENLNFDKFIQLSLKALQQILPLMLQGQRYDEAVSAIYGDHYGKKSDEIDRLLPNIPTDEIRNPVVLRTLTQARKVINAVVRLYGSPARIHIETGREVGKSYQDRKKLEKQQEENRKQRENAVKKFKEYFPNFVGEPKGKDILKMRLYELQQAKCLYSGKSLELYRLLEKGYVEVDHALPFSRTWDDSFNNKVLVLANENQNKGNATPYEWLDGKNNSEGWQHFVARVQTSGFSYAKKQRVLIQELDEKSFIERNLNDTRYVARFLCNHIADNMLLTGKGKRKVFASNGQITALLRGCWGLQKVRENNDRHHALDAVVVACSTKSMQDKITKFVKYKEGRLFKDKKDGVYKGERINRETGEIISLHFPTPWKFFKENVEIRIFSENPKLELENRLPDYPQYNHEFVQPLFVSRMPTRKMTGQGHMETVKSAKRLDKGLSVLKVPLTQLKLSDLERMVNREREMALYEALKECLEQFGNDPAKAFAEPFYKKGGALVKAVRVEQTQKSGVLVRNGNGVADNATGSIVRVDVFTKGGKYFLVPIYTWQVAKGILPNKAVIQGKDESEWEEMDENAVFQFSMHKNDLIKVKTKKGEIFGYFNGLDRATGSIEIEEHDLEKSKGKNGSHRGLGVKTAFFLEKYQVDELGKNIRPCRPTKRQHVR

SEQ ID NO: 54 - protein, 1340 aa, Dorea longicatena
MEQEYYLGLDMGTGSVGWAVTDSEYHVLRKHGKALWGVRLFESASTAEERRMFRTSRRRLDRRNWRIEILQEIFAEEISKKDPGFFLRMKESKYYPEDKRDINGNCPELPYALFVDDDFTDKDYHKKFPTIYHLRKMLMNTEETPDIRLVYLAIHHMMKHRGHFLLSGDINEIKEFGTTFSKLLENIKNEELDWNLELGKEEYAVVESILKDNMLNRSTKKTRLIKALKAKSICEKAVLNLLAGGTVKLSDIFGLEELNETERPKISFADNGYDDYIGEVENELGEQFYIIETAKAVYDWAVLVEILGKYTSISEAKVATYEKHKSDLQFLKKIVRKYLTKEEYKDIFVSTSDKLKNYSAYIGMTKINGKKVDLQSKRCSKEEFYDFIKKNVLKKLEGQPEYEYLKEELERETFLPKQVNRDNGVIPYQIHLYELKKILGNLRDKIDLIKENEDKLVQLFEFRIPYYVGPLNKIDDGKEGKFTWAVRKSNEKIYPWNFENVVDIEASAEKFIRRMTNKCTYLMGEDVLPKDSLLYSKYMVLNELNNVKLDGEKLSVELKQRLYTDVFCKYRKVTVKKIKNYLKCEGIISGNVEITGIDGDFKASLTAYHDFKEILTGTELAKKDKENIITNIVLFGDDKKLLKKRLNRLYPQITPNQLKKICALSYTGWGRFSKKFLEEITAPDPETGEVWNIITALWESNNNLMQLLSNEYRFMEEVETYNMGKQTKTLSYETVENMYVSPSVKRQIWQTLKIVKELEKVMKESPKRVFIEMAREKQESKRTESRKKQLIDLYKACKNEEKDWVKELGDQEEQKLRSDKLYLYYTQKGRCMYSGEVIELKDLWDNTKYDIDHIYPQSKTMDDSLNNRVLVKKKYNATKSDKYPLNENIRHERKGFWKSLLDGGFISKEKYERLIRNTELSPEELAGFIERQIVETRQSTKAVAEILKQVFPESEIVYVKAGTVSRFRKDFELLKVREVNDLHHAKDAYLNIVVGNSYYVKFTKNASWFIKENPGRTYNLKKMFTSGWNIERNGEVAWEVGKKGTIVTVKQIMNKNNILVTRQVHEAKGGLFDQQIMKKGKGQIAIKETDERLASIEKYGGYNKAAGAYFMLVESKDKKGKTIRTIEFIPLYLKNKIESDESIALNFLEKGRGLKEPKILLKKIKIDTLFDVDGFKMWLSGRTGDRLLFKCANQLILDEKIIVTMKKIVKFIQRRQENRELKLSDKDGIDNEVLMEIYNTFVDKLENTVYRIRLSEQAKTLIDKQKEFERLSLEDKSSTLFEILHIFQCQSSAANLKMIGGPGKAGILVMNNNISKCNKISIINQSPTGIFENEIDLLKI

SEQ ID NO: 55 - protein, 984 aa, Campylobacter jejuni
MAKILAFDIGISSIGWAFSENDELKDCGVRIFTKAENPKTGESLALPRRIARSARKRLARRKARLNHLKHLIANEFKLNYEDYQSFDEILAKAYKGSLISPYELRFRALNELLSKQDFARVILHIAKRRGYDDIKNNGDEEKGKILKAIKQNEEKLANYQSVGEYLYKEYFQKFKENSKEFINVRNKKESYERCIAQSFLKDELKLIFKKQREFGFSFSKKFEEEVLSVAFYKRALKDFSHLVGNCSFFTDEKRAPKNSPLAFMFVALTRIINLLNNLKNTLYTKDDLNALLNEVLKNGTLTYKQTKKLLGLSDDYEFKGEKGNYFIEFKKYKEFIKALGEHSLSQDDLNEIAKDITLIKDEIKLKKALAKYDLNENQIDNLSKLEFKDHLNISFKALKLITPLMLEGKKYDEACNELTLKVAINEDKKDFLPAFNETYYKDEVTNPVVLRAIKEYRKVLNALLKKYGKVHKINIELAREVGKNHSQRAKIEKEQNENYKAKKDAELECEKLGLKINSKNILKLRLFKEQKEFCVYSGEKIKLSDLQDEKMLEIDHIYPYSRSFDDSYMNKVLVFTKQNQEKLNQTPFEAFGNDSAKWQKIEVLAKNLPTKKQKRILDKNYKDKEQKDFKDRNLNDTRYIARLVLNYTKDYLDFLPLSDDENTKLNDTQKGSKVHVEAKSGMLTSALRHTWGFSTKDRNNHLHHAIDAVIIAYANNSIVKAFSDFKKEQESNTAELYAKKISELDYKNKRKFFEPFSGFRQKVLDKIDEIFVSKPERKKPSGALHEETFRKEEEFYQSYGGKEGVLKALELGKIRKVNGKIVKNGDMFRVDIFKHKKTNKFYAVPIYTMDFALKVLPNKAVARSKKGEIKDWILMDENYEFCFSLYKDSLILIQTKDMQEPEFVYYNAFTSSTVSLIVSKHDNKFETLSKNQKILFKNANEKEVIAKSIGIQNLKVFEKYIVSALGEVTKAEFRQREEFKNELR

SEQ ID NO: 56 - protein, 1037 aa, Parvibaculum lavamentivorans
MERIFGFDIGTTSIGFSVIDYSSTQSAGNIQRLGVRIFPEARDPDGTPLNQQRRQKRMMRRQLRRRRIRRKALNETLHEAGFLPAYGSADWPVVMADEPYELRRRGLEEGLSAYEFGRAIYHLAQHRHFKGRELEESDTPDPDVDDEKEAANERAATLKALKNEQTTLGAWLARRPPSDRKRGIHAHRNVVAEEFERLWEVQSKFHPALKSEEMRARISDTIFAQRPVFWRKNTLGECRFMPGEPLCPKGSWLSQQRRMLEKLNNLAIAGGNARPLDAEERDAILSKLQQQASMSWPGVRSALKALYKQRGEPGAEKSLKFNLELGGESKLLGNALEAKLADMFGPDWPAHPRKQEIRHAVHERLWAADYGETPDKKRVIILSEKDRKAHREAAANSFVADFGITGEQAAQLQALKLPTGWEPYSIPALNLFLAELEKGERFGALVNGPDWEGWRRTNFPHRNQPTGEILDKLPSPASKEERERISQLRNPTVVRTQNELRKVVNNLIGLYGKPDRIRIEVGRDVGKSKREREEIQSGIRRNEKQRKKATEDLIKNGIANPSRDDVEKWILWKEGQERCPYTGDQIGFNALFREGRYEVEHIWPRSRSFDNSPRNKTLCRKDVNIEKGNRMPFEAFGHDEDRWSAIQIRLQGMVSAKGGTGMSPGKVKRFLAKTMPEDFAARQLNDTRYAAKQILAQLKRLWPDMGPEAPVKVEAVTGQVTAQLRKLWTLNNILADDGEKTRADHRHHAIDALTVACTHPGMTNKLSRYWQLRDDPRAEKPALTPPWDTIRADAEKAVSEIVVSHRVRKKVSGPLHKETTYGDTGTDIKTKSGTYRQFVTRKKIESLSKGELDEIRDPRIKEIVAAHVAGRGGDPKKAFPPYPCVSPGGPEIRKVRLTSKQQLNLMAQTGNGYADLGSNHHIAIYRLPDGKADFEIVSLFDASRRLAQRNPIVQRTRADGASFVMSLAAGEAIMIPEGSKKGIWIVQGVWASGQVVLERDTDADHSTTTRPMPNPILKDDAKKVSIDPIGRVRPSND

SEQ ID NO: 57 - protein, 1107 aa, Eubacterium ventriosum
MGYTVGLDIGVASVGVAVLDENDNIVEAVSNIFDEADTSNNKVRRTLREGRRTKRRQKTRIEDFKQLWETSGYIIPHKLHLNIIELRNKGLTELLSLDELYCVLLSMLKHRGISYLEDADDGEKGNAYKKGLAFNEKQLKEKMPCEIQLERMKKYGKYHGEFIIEINDEKEYQSNVFTTKAYKKELEKIFETQRCNGNKINTKFIKKYMEIYERKREYYIGPGNEKSRTDYGIYTTRTDEEGNFIDEKNIFGKLIGKCSVYPEEYRASSASYTAQEFNLLNDLNNLKINNEKLTEFQKKEIVEIIKDASSVNMRKIIKKVIDEDIEQYSGARIDKKGKEIYHTFEIYRKLKKELKTINVDIDSFTREELDKTMDILTLNTERESIVKAFDEQKFVYEENLIKKLIEFRKNNQRLFSGWHSFSYKAMLQLIPVMYKEPKEQMQLLTEMNVFKSKKEKYVNYKYIPENEVVKEIYNPVVVKSIRTTVKILNALIKKYGYPESVVIEMPRDKNSDDEKEKIDMNQKKNQEEYEKILNKIYDEKGIEITNKDYKKQKKLVLKLKLWNEQEGLCLYSGKKIAIEDLLNHPEFFEIDHIIPKSISLDDSRSNKVLVYKTENSIKENDTPYHYLTRINGKWGFDEYKANVLELRRRGKIDDKKVNNLLCMEDITKIDVVKGFINRNLNDTRYASRVVLNEMQSFFESRKYCNTKVKVIRGSLTYQMRQDLHLKKNREESYSHHAVDAMLIAFSQKGYEAYRKIQKDCYDFETGEILDKEKWNKYIDDDEFDDILYKERMNEIRKKIIEAEEKVKYNYKIDKKCNRGLCNQTIYGTREKDGKIHKISSYNIYDDKECNSLKKMINSGKGSDLLMYNNDPKTYRDMLKILETYSSEKNPFVAYNKETGDYFRKYSKNHNGPKVEKVKYYSGQINSCIDISHKYGHAKNSKKVVLVSLNPYRTDVYYDNDTGKYYLVGVKYNHIKCVGNKYVIDSETYNELLRKEGVLNSDENLEDLNSKNITYKFSLYKNDIIQYEKGGEYYTERFLSRIKEQKNLIETKPINKPNFQRKNKKGEWENTRNQIALAKTKYVGKLVTDVLGNCYIVNMEKFSLVVDK

SEQ ID NO: 58 - protein, 1136 aa, Streptococcus gordonii
MNGLVLGLDIGIASVGVGILEKDTGKIIHASSRLFPAATADNNVERRSNRQGRRLNRRKKHRSVRLQDLFEGYGLLTDFSKVSMNLNPYQLRVQGMENQLTNEELFVALKNIVKRRGISYLDDASEDGGTVSSDYGKAVEENRKLLAEKTPGQIQLERFEKYGQLRGDFTVEENGEKHRLINVFSTSAYRKEAERILRKQQEFNSKITDEFIEDYLIILTGKRKYYHGPGNEKSRTDYGRFRTDGTTLDNIFGILIGKCTFYTEEYRASKASYTAQEFNLLNDLNNLTVPTETKKLSEEQKKLIIEYAKSAKTLGASTLLKYIAKMIDASVDQIRGYRVDVNNKPEMHTFEVYRKMQSLETIKVEELPRKVLDELAHILTLNTEREGIEEAINSKLKDIFNRDQVLELVQFRKNNSSLFSKGWHNFSIKLMMELIPELYETSEEQMTILTRLGKQRSKETSKRTKYIDEKELTEEIYNPVVAKSVRQAIKIINEATKKYGIFDNIVIEMARENNEEDAKKDYIKRQKANQDEKNAAMEKAAFQYNGKKELPDNIFHGHKELTTKIRLWHQQGEKCLYTGKNIPISDLIHNQYKYEIDHILPLSLSFDDSLSNKVLVLATANQEKGQRTPFQALDSMDDAWSYREFKSYVKDSKLLSNKKKDYLLTEEDISKIEVKQKFIERNLVDTRYSSRVVLNALQDFYKSHQLDTTISVVRGQFTSQLRRKWGIEKSRETYHHHAVDALIIAASSQLRLWKKHSNPLIAYKEGQFVDSETGEIVSLSDEEYKELVFKAPYDHFVDTLRSKKFEDSILFSYQVDSKYNRKISDATIYATRKAKLDKEKKEYTYTLGKIKDIYALGTKTPSKTGFYKFLDLYKTDKSQFLMYQKDRKTWDEVIEKIIEQYRPFKEYDKNGKEVDFNPFEKYRIGNGPIRKYSKKGNGPEIKSLKYYDILLGKHKNITPDGSRNTVALLSLNPWRTDVYYNSETKKYEFLGLKYADLCFEEGGAYGISEVKYKKIREKEGIGKNSEFKFTLYKNDLILIKDTETNCQQFFRFWSRTGKDNPKSFEKHKIELKPYEKAKFEKGEELKVLGKVPPSSNQFQKNMQIENLSIYKVKTDILGNKHFIKKEGDEPKLKFKK

SEQ ID NO: 59 - protein, 984 aa, Campylobacter jejuni
MARILAFDIGISSIGWAFSENDELKDCGVRIFTKAENPKTGESLALPRRLARSARKRLARRKARLNHLKHLIANEFKLNYEDYQSFDESLAKAYKGSLISPYELRFRALNELLSKQDFARVILHIAKRRGYDDIKNNGDEEKSEILKAIKQNEEKLVNYQSVGEYLYKEYFQKFKENSKEFINVRNKKESYERCITQSFLKDELKLIFQKQREFGFSFSKKFEEEVLSVAFYKRALKDFSHLVGNCSFFTDEKRAPKNSPLAFMFVALTRIINILNNLKNTEGILYTKDDLNALLNEVLKNGTLTYKQTKKLLGLSDDYEFKGEKGTYFIEFKKYKEFIKALGEHNLSQDDLNEIAKDITLIKDEIKLKKALAKYDLNQNQIDSLSKLEFKDHLNISFKALKLITPLMLEGKKYDEACNELNLKVAINEDKKDFLPAFNETYYKDEVTNPVVLRAIKEYRKILNALLKKYGKVHKINIELAREVGKNHSQRAKIEKEQNENYKAKKDAEIECEKLGLKINSKNILKLRLFKEQKEFCAYSGEKIKLSDLQDEKMLEIDHIYPYSRSFDDSYMNKVLVFTKQNQEKLNKTPFEAFGNDSTKWQKIEVLAKNLPEKKQKRILDKNYKDKEQKDFKDRNLNDTRYIARLVLNYTKDYLDFLPLSDDENTKLNDTQKGSKVHVEAKSGMLTSALRHTWGFSAKDRNNHLHHAIDAAIIAYANNSIVKAFSDFKKEQESNSVELYAKKISELDYKNKRKFFEPFSGFRQKVLDKIDEIFVSKPERKKPSGALHEETFRKEEEFYQSYGGKEGVLKALELGKIRKVNGKIVKNGDMFRVDIFKHKKTNKFYAVPIYTMDFALKVLPNKAVARSKKGEIKDWILMDENYEFCFSLYKDSLILIQTKDMQEPELVYFNAFTSSTVSLIVSKHDNKFETLSKNQKILFKNANEKEVIAKSIGIQNLKVFEKYIVSALGEVTKAEFRQREDFKK

SEQ ID NO: 60 - protein, 1079 aa, Dinoroseobacter shibae
MRLGLDIGTSSIGWWLYETDGAGSDARITGVVDGGVRIFSDGRDPKSGASLAVDRRAARAMRRRRDRYLRRRATLMKVLAETGLMPADPAEAKALEALDPFALRAAGLDEPLPLPHLGRALFHLNQRRGFKSNRKTDRGDNESGKIKDATARLDMEMMANGARTYGEFLHKRRQKATDPRHVPSVRTRLSIANRGGPDGKEEAGYDFYPDRRHLEEEFHKLWAAQGAHHPELTETLRDLLFEKIFFQRPLKEPEVGLCLFSGHHGVPPKDPRLPKAHPLTQRRVLYETVNQLRVTADGREARPLTREERDQVIHALDNKKPTKSLSSMVLKLPALAKVLKLRDGERFTLETGVRDAIACDPLRASPAHPDRFGPRWSILDADAQWEVISRIRRVQSDAEHAALVDWLTEAHGLDRAHAEATAHAPLPDGYGRLGLTATTRILYQLTADVVTYADAVKACGWHHSDGRTGECFDRLPYYGEVLERHVIPGSYHPDDDDITRFGRITNPTVHIGLNQLRRLVNRIIETHGKPHQIVVELARDLKKSEEQKRADIKRIRDTTEAAKKRSEKLEELEIEDNGRNRMLLRLWEDLNPDDAMRRFCPYTGTRISAAMIFDGSCDVDHILPYSRTLDDSFPNRTLCLREANRQKRNQTPWQAWGDTPHWHAIAANLKNLPENKRWRFAPDAMTRFEGENGFLDRALKDTQYLARISRSYLDTLFTKGGHVWVVPGRFTEMLRRHWGLNSLLSDAGRGAVKAKNRTDHRHHAIDAAVIAATDPGLLNRISRAAGQGEAAGQSAELIARDTPPPWEGFRDDLRVRLDRIIVSHRADHGRIDHAARKQGRDSTAGQLHQETAYSIVDDIHVASRTDLLSLKPAQLLDEPGRSGQVRDPQLRKALRVATGGKTGKDFENALRYFASKPGPYQAIRRVRIIKPLQAQARVPVPAQDPIKAYQGGSNHLFEIWRLPDGEIEAQVITSFEAHTLEGEKRPHPAAKRLLRVHKGDMVALERDGRRVVGHVQKMDIANGLFIVPHNEANADTRNNDKSDPFKWIQIGARPAIASGIRRVSVDEIGRLRDGGTRPI

SEQ ID NO: 61 - protein, 1096 aa, Unknown
  Eubacterium dolichum
MMEVFMGRLVLGLDIGITSVGFGIIDLDESEIVDYGVRLFKEGTAAENETRRTKRGGRRLKRRRVTRREDMLHLLKQAGIISTSFHPLNNPYDVRVKGLNERLNGEELATALLHLCKHRGSSVETIEDDEAKAKEAGETKKVLSMNDQLLKSGKYVCEIQKERLRTNGHIRGHENNFKTRAYVDEAFQILSHQDLSNELKSAIITIISRKRMYYDGPGGPLSPTPYGRYTYFGQKEPIDLIEKMRGKCSLFPNEPRAPKLAYSAELFNLLNDLNNLSIEGEKLTSEQKAMILKIVHEKGKITPKQLAKEVGVSLEQIRGFRIDTKGSPLLSELTGYKMIREVLEKSNDEHLEDHVFYDEIAEILTKTKDIEGRKKQISELSSDLNEESVHQLAGLTKFTAYHSLSFKALRLINEEMLKTELNQMQSITLFGLKQNNELSVKGMKNIQADDTAILSPVAKRAQRETFKVVNRLREIYGEFDSIVVEMAREKNSEEQRKAIRERQKFFEMRNKQVADIIGDDRKINAKLREKLVLYQEQDGKTAYSLEPIDLKLLIDDPNAYEVDHIIPISISLDDSITNKVLVTHRENQEKGNLTPISAFVKGRFTKGSLAQYKAYCLKLKEKNIKTNKGYRKKVEQYLLNENDIYKYDIQKEFINRNLVDTSYASRVVLNTLTTYFKQNEIPTKVFTVKGSLTNAFRRKINLKKDRDEDYGHHAIDALIIASMPKMRLLSTIFSRYKIEDIYDESTGEVFSSGDDSMYYDDRYFAFIASLKAIKVRKFSHKIDTKPNRSVADETIYSTRVIDGKEKVVKKYKDIYDPKFTALAEDILNNAYQEKYLMALHDPQTFDQIVKVVNYYFEEMSKSEKYFTKDKKGRIKISGMNPLSLYRDEHGMLKKYSKKGDGPAITQMKYFDGVLGNHIDISAHYQVRDKKVVLQQISPYRTDFYYSKENGYKFVTIRYKDVRWSEKKKKYVIDQQDYAMKKAEKKIDDTYEFQFSMHRDELIGITKAEGEALIYPDETWHNFNFFFHAGETPEILKFTATNNDKSNKIEVKPIHCYCKMRLMPTISKKIVRIDKYATDVVGNLYKVKKNTLKFEFD

SEQ ID NO: 62 - protein, 1082 aa, Neisseria meningitidis
MAAFKPNPINYILGLDIGIASVGWAMVEIDEDENPICLIDLGVRVFERAEVPKTGDSLAMARRLARSVRRLTRRRAHRLLRARRLLKREGVLQAADFDENGLIKSLPNTPWQLRAAALDRKLTPLEWSAVLLHLIKHRGYLSQRKNEGETADKELGALLKGVADNAHALQTGDFRTPAELALNKFEKESGHIRNQRGDYSHTFSRKDLQAELNLLFEKQKEFGNPHISDGLKEGIETLLMTQRPALSGDAVQKMLGHCTFEPAEPKAAKNTYTAERFIWLTKLNNLRILEQGSERPLTDTERTTLIDEPYRKSKLTYAQARKLLELDNTAFFKGLRYGKDNAEASTLMEMKAYHAISRALEKEGLKDKKSPLNLSPELQDEIGTAFSLFKTDEDITGRLKDRVQPEILEALLKHISFDKFVQISLKALRRIVPLMEQGKRYDEACAEIYGDHYGKKNTEEKIDLPPIPADEIRNPVVLRALSQARKVINGVVRRYGSPARIHIETAREVGKSFKDRKEIEKRQEENRKDREKAATKFREYFPNFVGEPKSKDILKLRLYEQQHGKCLYSGKEINLGRLNEKGYVEIDHALPFSRTWDDSFNNKVLVLGSENQNKGNQTPYEYFNGKDNSREWQEFKARVETSRFPRSKKQRILLQKFDEEGFKERNLNDTRYVNRFLCQFVADHMLLTGKGKRRVFASNGQITNLLRGFWGLRKVRAENDRHHALDAVVVACSTVAMQQKITRFVRYKEMNAFDGKTIDKETGEVLHQKTHFPQPWEFFAQEVMIRVFGKPDGKPEFEEADTPEKLRTLLAEKLSSRPEAVHEYVTPLFVSRAPNRKMSGQGHMETVKSAKRLDEGVSVLRVPLTQLKLKDLEKMVNREREPKLYEALKARLEAHKDDPAKAFAEPFYKYDKAGNRTQQVKAVRVEQVQKTGVWVRNHNGIADNATMVRVDVFEKGDKYYLVPIYSWQVAKGILPDRAVVQGKDEEDWQLIDDSFNFKFSLHPNDLVEVITKKARMFGYFASCHRGTGNINIRIHDLDHKIGKNGILEGIGVKTALSFQKYQIDELGKEIRPCRLKKRPPVR

SEQ ID NO: 63 - protein, 1050 aa, Gluconacetobacter diazotrophicus
MGENMIDESLTFGIDLGIGSCGWAVLRRPSAFGRKGVIEGMGSWCFDVPETSKERTPTNQIRRSNRLLRRVIRRRRNRMAAIRRLLHAAGLLPSTDSDALKRPGHDPWELRARGLDKPLKPVEFAVVLGHIAKRRGFKSAAKRKATNISSDDKKMLTALEATRERLGRYRTVGEMFARDPDFASRRRNREGKYDRTTARDDLEHEVHALFAAQRRLGQGFASPELEEAFTASAFHQRPMQDSERLVGFCPFERTEKRAAKLTPSFERFRLLARLLNLRITTPDGERPLTVDEIALVTRDLGKTAKLSIKRVRTLIGLEDNQRFTTIRPEDEDRDIVARTGGAMTGTATLRKALGEALWTDMQERPEQLDAIVQVLSFFEANETITEKLREIGLTLAVLDVLLTALDAGVFAKFKGAAHISTKAARNLLPHLEQGRRYDEACTMAGYDHAASRLSHHGQIVAKTQFNALVTEIGESIANPIARKALIEGLKQIWAMRNHWGLPGSIHVELARDVGNSIEKRREIEKHIEKNTALRARERREVHDLLDLEDVNGDTLLRYRLWKEQGGKCLYTGKAIHIRQIAATDNSVQVDHILPWSRFGDDSFNNKTLCLASANQQKKRSTPYEWLSGQTGDAWNAFVQRIETNKELRGFKKRNYLLKNAKEAEEKFRSRNLNDTRYAARLFAEAVKLLYAFGERQEKGGNRRVFTRPGALTAALRQAWGVESLKKQDGKRINDDRHHALDALTVAAVDEAEIQRLTKSFHEWEQQGLGRPLRRVEPPWESFRADVEATYPEVFVARPERRRARGEGHAATIRQVKERECTPIVFERKAVSSLKEADLERIKDGERNEAIVEAIRSWIATGRPADAPPRSPRGDIITKIRLATTIKAAVPVRGGTAGRGEMVRADVFSKPNRRGKDEWYLVPVYPHQIMNRKAWPKPPMRSIVANKDEDEWTEVGPEHQFRFSLYPRSNIEIIRPSGEVIEGYFVGLHRNTGALTISAHNDPKSIHSGIGTKTLLAISKYQVDRFGRKSPVRKEVRTWHGEACISPTPPG

SEQ ID NO: 64 - protein, 1391 aa, Kordia algicida
MKKILGLDLGTNSIGWALVNEAEHEHEQSSIVKLGVRVNPLSVDEKTNFEKGRPLSINADRTSKRSARRNLQRFKLRRKNLINLLLKHHIISNETILTEVGKNTTHQTLKLRSKATQEKISLEEFARILLSINKKRGYKSSRKEKNEDEGFTIDGMAIAKELYDNQLTPGQYVYNILQDGKNYIPDFYRSDLQAEFDDVWQFQKKFYSSILTDEFYLKLKGQGKENTRKLFLAIHQVYTAENKGKRDAVKLQYYKWRSEAVKKQLSIEEVAYVLVEINNNINKSSGYLGAISDRSKALYFNNETVGEYLYGQLVKNRHNSLRNQVFYRQDYLDEFEKIWETQAKFYDELTNELKQEIRDVVIFYQRKLKSQKHLISDCLFEKHHKAIPKSSPLFQEFKIWQNLNYLEFVHTQSKEKIFFSELDDETRQFVFAELNIRGTLKIKEIKKLIGLETPVYWKSNFDEIEGNRTNQVLYNVYQNIADDLGYGFDWSKKHAFEINAELQAIFKDVGIDTAILNFDASIEENDFDKQKSYQLWHLLYSAEDTDKATEEDKLIYGNINTKLKKQLHQKYGFEAKYGNLLANISLQQDYGNLSAKAIKKILPYLESGNSFYEACTIVGYNPSNSLTKEQQQNRKLKDKLELLPKNSLRNPVVEKILNQKVNLINQLIDEYGKPDEVRIELARELKKSAKQRADLSKHINDATLKNQNIRKTLQKDFGIQNPSKNDVIRYKLYDELKDNGYKTLFTNKYIPKEQLFSKDVDIEHIIPKAILFDDSFSNKTLAYRNVNLAKADATAFDFISSKHLDDLDNYKARVETLFQSKRISKGKYKKLLMTRQNLPEDFIERDLRNSQYIAKKATAMLKEVFRSVVPTSGRITDKLREDWDLVNVMKELNLPKYRTLGLTEFIERKNGNKIEQIIDWTKRNDHRHHAMDALTVAFTTHNHIQYLNNLNVTHGLNGVDTDHEKSRLYAIKQAITKVYIVGKTKKRKFIPPMENFRSHAKNHLEGILISFKNKNKVVTKNKNRTKTKTKGVFNEKIQLTPRGQLHKETIYGHAKKVIVTKEKVSSKFTHEKILQVTKPAYREALLKRLASFKNDPKKAFSGKNALSKNPLYFDITSGKKVPDTVKLSYFENSYVIRKEVNSDNFKNEKSLQKVLDVGIRRILEKRLADYNGNAKEAFSNLEKNPIWKDKEKGVCIKKVRIEALKNAEPLHVKKDHLGKIILDDENKSTPVDFISTGNNHHVAIYEDKDGKLHDKVVSFYEVVSRVNLGLPIIDKSFNSHLDWKFLFSMKQNEMFVFPSEDFNPKEIDIGNPKNNELISKYLFRVQKFSKVTYGNSAVRDYVFRHHLETELIDKKELKGITYYQLKSIGMLEKLVKVRINHIGKIVHIGEY

SEQ ID NO: 65 - protein, 1116 aa, Clostridium spiroforme
MVEFLLKEMKIMGRLVLGLDIGITSVGYGVIDIDKNEFVDYGVRLFKEGTAINNEERRSKRGARRLKRRKTNRIADMKKLLERNGLIDEQYTALNNPYEIRKKGLKNKLSNYELATAILHITKNRGTCLESNADETQDEESTKNILSKNALELKDKYICEIQLARLEESGKIRGINNNFKTEDYLKELSKILENQDLEKETIDKIKEIVARRRRYDQGPGSEKSPTPYGSYRMENGELVHVNLIDMMRGKCSVFPDQLRAPQQSYSAELFNLLNDLNNLKINGEKLSSTEKQKIIDFVNEKGGITVKQLLKLIDVGITEISGFRIDKNEKPLITEFKGYKKVLKVFKNYNQESLLNDKSIVDTIMDINTKIKSIDERSDQLKQVLPSLDTSIINDLASIKGVSGYHSLSLKALNLINNEMLKTEMNQMQVLHQLDIFDKNRVSLKGQRQIYADDNAILSPVAKRAHRETFKVINKLRSIYGEFDSIVIETTRDKNTQDQKKRIKNNQKNYEERNTEVNNFLKEAGYNPENINAKTKMKIRLYIEQDAKSAYTLQDINLKELIEDEKAYEIDHIIPISISLDDSFNNKVLTTHDENQEKGNLTPISAFLKGKFHNGNLNTYKVFIQNNKNLNRKKKEYLLCEDDITRYEVVQNFINRNLVDTSYACRTVMNTLVHYFKDNEINTKVHTIKGQATSTFRKRIGLIKDREEDYFHHAIDALIVASLKKMNLINSYLMKVDFNEMYDEETGEIFNVLPDNSYLDEKYISFVSNLKNIYEESNKYIRGVMIKEKMTYPLIKVSHKIDTKPNRKISDDTIYSTRNVDNQDMLVERIKNIYDPKENAANTLINDIINDNTDKYIMYHKDPQTFDKIKAIVLNHFNEFKTDKNCYIVTKEGLYKLKGTSPLALYYEEFGPITKYAKKNNGPTIHSMKFYSEKLGNHLSITHKYSTVNKKVITKQISPYRTDFYQSPEGKYKFVTVRYKDVAYNAKKDKYIIDHSWYREQKKLKKIADEWIFVCSVHRDELIGIMKADGQKRIFDSSTESDGETLYHDAKTYEILKFTATNNDITGRFEVKPIYCYCKKQLMVSIGTCRKIQKFATDVLGNLYIVKDNVLKLEFK

SEQ ID NO: 66 - protein, 1348 aa, Finegoldia magna
MKSEKKYYIGLDVGTNSVGWAVTDEFYNILRAKGKDLWGVRLFEKADTAANTRIFRSGRRRNDRKGMRLQILREIFEDEIKKVDKDFYDRLDESKFWAEDKKVSGKYSLFNDKNFSDKQYFEKFPTIFHLRKYLMEEHGKVDIRYYFLAINQMMKRRGHFLIDGQISHVTDDKPLKEQLILLINDLLKIELEEELMDSIFEILADVNEKRTDKKNNLKELIKGQDFNKQEGNILNSIFESIVTGKAKIKNIISDEDILEKIKEDNKEDFVLTGDSYEENLQYFEEVLQENITLFNTLKSTYDFLILQSILKGKSTLSDAQVERYDEHKKDLEILKKVIKKYDEDGKLFKQVFKEDNGNGYVSYIGYYLNKNKKITAKKKISNIEFTKYVKGILEKQCDCEDEDVKYLLGKIEQENFLLKQISSINSVIPHQIHLFELDKILENLAKNYPSFNNKKEEFTKIEKIRKTFTFRIPYYVGPLNDYHKNNGGNAWIFRNKGEKIRPWNFEKIVDLHKSEEEFIKRMLNQCTYLPEETVLPKSSILYSEYMVLNELNNLRINGKPLDTDVKLKLIEELFKKKTKVTLKSIRDYMVRNNFADKEDFDNSEKNLEIASNMKSYIDFNNILEDKFDVEMVEDLIEKITIHTGNKKLLKKYIEETYPDLSSSQIQKIINLKYKDWGRLSRKLLDGIKGTKKETEKTDTVINFLRNSSDNLMQIIGSQNYSFNEYIDKLRKKYIPQEISYEVVENLYVSPSVKKMIWQVIRVTEEITKVMGYDPDKIFIEMAKSEEEKKTTISRKNKLLDLYKAIKKDERDSQYEKLLTGLNKLDDSDLRSRKLYLYYTQMGRDMYTGEKIDLDKLFDSTHYDKDHIIPQSMKKDDSIINNLVLVNKNANQTTKGNIYPVPSSIRNNPKIYNYWKYLMEKEFISKEKYNRLIRNTPLTNEELGGFINRQLVETRQSTKAIKELFEKFYQKSKIIPVKASLASDLRKDMNTLKSREVNDLHHAHDAFLNIVAGDVWNREFTSNPINYVKENREGDKVKYSLSKDFTRPRKSKGKVIWTPEKGRKLIVDTLNKPSVLISNESHVKKGELFNATIAGKKDYKKGKIYLPLKKDDRLQDVSKYGGYKAINGAFFFLVEHTKSKKRIRSIELFPLHLLSKFYEDKNTVLDYAINVLQLQDPKIIIDKINYRTEIIIDNFSYLISTKSNDGSITVKPNEQMYWRVDEISNLKKIENKYKKDAILTEEDRKIMESYIDKIYQQFKAGKYKNRRTTDTIIEKYEIIDLDTLDNKQLYQLLVAFISLSYKTSNNAVDFTVIGLGTECGKPRITNLPDNTYLVYKSITGIYEKRIRIK

SEQ ID NO: 67 - protein, 1129 aa, Streptococcus infantarius
MSNGKILGLDIGVASVGVGIIDSKTGNVIHANSRLFSAANAENNAERRGFRGARRLTRRKKHRVKRVRDLFEKYDISTDFRNLNLNPYELRVKGLTEQLTNEELFAALRTIAKRRGISYLDDAEDDSTGSSDYAKSIDENRRLLKTKTPGQIQLERLEKYGQLRGNFTVYDENGEAHRLINVFSTSDYKNEARKILETQSNYNKQITDEFIEDYIEILTQKRKYYHGPGNEKSRTDYGRFRTDGTTLENIFGILIGKCSFYPEEYRASKASYTAQEFNFLNDLNNLKVPTETGKLSTEQKEYLVDFAKKSKALGASKLLKEIAKIVDCSVDDIKGYRVDNKDKPDLHTFEPYRKLKFNLSSIDIDELSRETLDKLADILTLNTEREGIEDAIKRNLPSQFTEEQISEIVQIRKNQSSAFNKGWHSFSAKLMNELIPELYVTSEEQMTILTRLEKFKVNKKSSKNTKTIDEKEITDEIYNPVVAKSVRQTIKIINAAVKKYGDFDKIVIEMPRDKNAEDEKKFIDKKQKENKKEKDDSLKRAAFLYNGTDNLPDGVFHGNKELKTKIRLWYQQGERCLYSGKLISIHDLVHNSNKFEIDHILPLSLSFDDSLANKVLVYAWTNQEKGQKTPYQVIDSMDTAWSFREMKDYVLKQKGLGKKKCEYLLTTENIDKIEVKKKFIERNLVDTRYASRVVLNSLQTALKELGKDTKVSVVRGQFTSQLRRKWNIDKSRETYHHHAVDALIIAASSQLKLWQKQENPMFESYGENQVVNKETGEILSISDDKYKELVFQPPYQGFVNTISSKGFEDEILFSYQVDSKFNRKVSDATIYSTRKAKLGKDKKDETYVLGKIKDIYSQDGFDTFIKRYKKDKTQFLMYQKDPLTWENVIEVILRDYPSEKLSEDGKKTVKCNPFEEYRRENGLICKYSKKGNGTPIKSLKYYDKKLGNCIDITPEKSKNRVVLRQISPWRADIYFNLETLKYELMGLKYSDLSFEKGTGKYHISQEKYDAIREKEGIGKKSEFKFTLYRNDLILIKDTLNNCERMLRFGSKNDTSKHYVELKPLEKGTFDSEEEILPVLGKVAKSGQFIKGLNKPNISIYKVRTDVLGNKFFIKKEGDKPKLDFKNNNK

SEQ ID NO: 68 - protein, 1065 aa, Clostridium perfringens
MNKDINYALGLDIGITSVGWAVINLDLNRIEDLGVRIFNAAENLKDGSSLALPRRLARGRRRLLRRKAYRVERVRKLILKNNILTKEELEGLFKNKEVIDVWEARVKGLDYKLSREEWAKILINFCKRRGFKSNRKNEAKDKEAGQILSSISYNIEKMKETNSRTIGEYIYNEVKNSEDSYAPLRNKFGEYKMCVSRDVIREEIHTLFEKQRELGNNFASDEIEDKYFEIFNSQRPFSNFEDLEKLVGFCTFERKKHKRAPKHCISSEEFTLYEGINKLSIIKDGEKRKLSEEERTLVVNEAFNKKEIKYTTLRKLLGLSEEELFSTLTYSIDKDISKTENTKFVSLKGYHEIKRAIEKGVSKKAWQDIENNRNLLNDIAYVLTLGKTDDEIEKQLRLRNVPEELFESLLDMSFNKFNNLSIYALEKILPFMKEGYQYNEACEKAGYNFKAIYEGVRTKKLPVIEIDEIVNPVVNRALAQTRKVINSVIDKYGSPVRINIELARDLAKNFKDRKLIEKEQKENRANLDKIRENLRELMDKEPTVVEVLKYRLWEQQRGECAYTQSQIPLERLFSPGYCEIDHIIPFSRSFDDSLSNKILVLGSENQRKGNRTPYEYFGEDSERWNSFEIWVKGSYLNYKKKANLLKKKFSEEEQRDWKARNLQDTKYICRYISNFVNNRLEFKESENKQKVITVNGRATAYLRSRWGLNKVREDGDKHHALDAAVVGVTTQGMVQKISKYSKAHELYTVRKNDEFVDVETGECVDVDEYKEIRKDILPRPWRGFSEELKLRLSDNPLEELKKSPIETYNEEFIKENVKPIFVSRVPFRKISGKLFKETIYSERAFKDGYFVSKKSLVDLKRGDLDNFYNYECDKKLYDAISERMKEFNYNGKKAFESPFRKPTKSGKEGPVVRSVKIKSAVPFKDGIPMNEGLVAKEGMVRIDIYEKEGKYFVVPVYRYQLAKGIVPKRAAIAKKDELKWPIMDQTYNFKFSIYKNDLIEVKYDKKGVYFGYYDGFDRNSASLTIEKHDNSERYRSIGLKVGVLEINKYEVDVLGNYHKVKLGGN

SEQ ID NO: 69 - protein, 1195 aa, Elusimicrobium minutum
MQKNINTKQNHIYIKQAQKIKEKLGDKPYRIGLDLGVGSIGFAIVSMEENDGNVLLPKEIIMVGSRIFKASAGAADRKLSRGQRNNHRHTRERMRYLWKVLAEQKLALPVPADLDRKENSSEGETSAKRFLGDVLQKDIYELRVKSLDERLSLQELGYVLYHIAGHRGSSAIRTFENDSEEAQKENTENKKIAGNIKRLMAKKNYRTYGEYLYKEFFENKEKHKREKISNAANNHKFSPTRDLVIKEAEAILKKQAGKDGFHKELTEEYIEKLTKAIGYESEKLIPESGFCPYLKDEKRLPASHKLNEERRLWETLNNARYSDPIVDIVTGEITGYYEKQFTKEQKQKLFDYLLTGSELTPAQTKKLLGLKNTNFEDIILQGRDKKAQKIKGYKLIKLESMPFWARLSEAQQDSFLYDWNSCPDEKLLTEKLSNEYHLTEEEIDNAFNEIVLSSSYAPLGKSAMLIILEKIKNDLSYTEAVEEALKEGKLTKEKQAIKDRLPYYGAVLQESTQKIIAKGFSPQFKDKGYKTPHTNKYELEYGRIANPVVHQTLNELRKLVNEIIDILGKKPCEIGLETARELKKSAEDRSKLSREQNDNESNRNRIYEIYIRPQQQVIITRRENPRNYILKFELLEEQKSQCPFCGGQISPNDIINNQADIEHLFPIAESEDNGRNNLVISHSACNADKAKRSPWAAFASAAKDSKYDYNRILSNVKENIPHKAWRFNQGAFEKFIENKPMAARFKTDNSYISKVAHKYLACLFEKPNIICVKGSLTAQLRMAWGLQGLMIPFAKQLITEKESESFNKDVNSNKKIRLDNRHHALDAIVIAYASRGYGNLLNKMAGKDYKINYSERNWLSKILLPPNNIVWENIDADLESFESSVKTALKNAFISVKHDHSDNGELVKGTMYKIFYSERGYTLTTYKKLSALKLTDPQKKKTPKDFLETALLKFKGRESEMKNEKIKSAIENNKRLFDVIQDNLEKAKKLLEEENEKSKAEGKKEKNINDASIYQKAISLSGDKYVQLSKKEPGKFFAISKPTPTTTGYGYDTGDSLCVDLYYDNKGKLCGEIIRKIDAQQKNPLKYKEQGFTLFERIYGGDILEVDFDIHSDKNSFRNNTGSAPENRVFIKVGTFTEITNNNIQIWFGNIIKSTGGQDDSFTINSMQQYNPRKLILSSCGFIKYRSPILKNKEG

SEQ ID NO: 70 - protein, 1101 aa, Akkermansia muciniphila
MSRSLTFSFDIGYASIGWAVIASASHDDADPSVCGCGTVLFPKDDCQAFKRREYRRLRRNIRSRRVRIERIGRLLVQAQIITPEMKETSGHPAPFYLASEALKGHRTLAPIELWHVLRWYAHNRGYDNNASWSNSLSEDGGNGEDTERVKHAQDLMDKHGTATMAETICRELKLEEGKADAPMEVSTPAYKNLNTAFPRLIVEKEVRRILELSAPLIPGLTAEIIELIAQHHPLTTEQRGVLLQHGIKLARRYRGSLLFGQLIPRFDNRIISRCPVTWAQVYEAELKKGNSEQSARERAEKLSKVPTANCPEFYEYRMARILCNIRADGEPLSAEIRRELMNQARQEGKLTKASLEKAISSRLGKETETNVSNYFTLHPDSEEALYLNPAVEVLQRSGIGQILSPSVYRIAANRLRRGKSVTPNYLLNLLKSRGESGEALEKKIEKESKKKEADYADTPLKPKYATGRAPYARTVLKKVVEEILDGEDPTRPARGEAHPDGELKAHDGCLYCLLDTDSSVNQHQKERRLDTMTNNHLVRHRMLILDRLLKDLIQDFADGQKDRISRVCVEVGKELTTFSAMDSKKIQRELTLRQKSHTDAVNRLKRKLPGKALSANLIRKCRIAMDMNWTCPFTGATYGDHELENLELEHIVPHSFRQSNALSSLVLTWPGVNRMKGQRTGYDFVEQEQENPVPDKPNLHICSLNNYRELVEKLDDKKGHEDDRRRKKKRKALLMVRGLSHKHQSQNHEAMKEIGMTEGMMTQSSHLMKLACKSIKTSLPDAHIDMIPGAVTAEVRKAWDVFGVFKELCPEAADPDSGKILKENLRSLTHLHHALDACVLGLIPYIIPAHHNGLLRRVLAMRRIPEKLIPQVRPVANQRHYVLNDDGRMMLRDLSASLKENIREQLMEQRVIQHVPADMGGALLKETMQRVLSVDGSGEDAMVSLSKKKDGKKEKNQVKASKLVGVFPEGPSKLKALKAAIEIDGNYGVALDPKPVVIRHIKVFKRIMALKEQNGGKPVRILKKGMLIHLTSSKDPKHAGVWRIESIQDSKGGVKLDLQRAHCAVPKNKTHECNWREVDLISLLKKYQMKRYPTSYTGTPR

SEQ ID NO: 71 - protein, 1187 aa, Bifidobacterium longum
MLSRQLLGASHLARPVSYSYNVQDNDVHCSYGERCFMRGKRYRIGIDVGLNSVGLAAVEVSDENSPVRLLNAQSVIHDGGVDPQKNKEAITRKNMSGVARRTRRMRRRKRERLHKLDMLLGKFGYPVIEPESLDKPFEEWHVRAELATRYIEDDELRRESISIALRHMARHRGWRNPYRQVDSLISDNPYSKQYGELKEKAKAYNDDATAAEEESTPAQLVVAMLDAGYAEAPRLRWRTGSKKPDAEGYLPVRLMQEDNANELKQIFRVQRVPADEWKPLFRSVFYAVSPKGSAEQRVGQDPLAPEQARALKASLAFQEYRIANVITNLRIKDASAELRKLTVDEKQSIYDQLVSPSSEDITWSDLCDFLGFKRSQLKGVGSLTEDGEERISSRPPRLTSVQRIYESDNKIRKPLVAWWKSASDNEHEAMIRLLSNTVDIDKVREDVAYASAIEFIDGLDDDALTKLDSVDLPSGRAAYSVETLQKLTRQMLTTDDDLHEARKTLFNVTDSWRPPADPIGEPLGNPSVDRVLKNVNRYLMNCQQRWGNPVSVNIEHVRSSFSSVAFARKDKREYEKNNEKRSIFRSSLSEQLRADEQMEKVRESDLRRLEAIQRQNGQCLYCGRTITFRTCEMDHIVPRKGVGSTNTRTNFAAVCAECNRMKSNTPFAIWARSEDAQTRGVSLAEAKKRVTMFTFNPKSYAPREVKAFKQAVIARLQQTEDDAAIDNRSIESVAWMADELHRRIDWYFNAKQYVNSASIDDAEAETMKTTVSVFQGRVTASARRAAGIEGKIHFIGQQSKTRLDRRHHAVDASVIAMMNTAAAQTLMERESLRESQRLIGLMPGERSWKEYPYEGTSRYESFHLWLDNMDVLLELLNDALDNDRIAVMQSQRYVLGNSIAHDATIHPLEKVPLGSAMSADLIRRASTPALWCALTRLPDYDEKEGLPEDSHREIRVHDTRYSADDEMGFFASQAAQIAVQEGSADIGSAIHHARVYRCWKTNAKGVRKYFYGMIRVFQTDLLRACHDDLFTVPLPPQSISMRYGEPRVVQALQSGNAQYLGSLVVGDEIEMDFSSLDVDGQIGEYLQFFSQFSGGNLAWKHWVVDGFFNQTQLRIRPRYLAAEGLAKAFSDDVVPDGVQKIVTKQGWLPPVNTASKTAVRIVRRNAFGEPRLSSAHHMPCSWQWRHE

SEQ ID NO: 72 - protein, 166 aa, Unknown
  uncultured Termite
MNKVQEIEYKKIREKLADREYRIGLDLGVGSIGYVVVSLKECNDLSYLPEDIILSGSRIFKSSIGAVERREFRLQRNSHRHHRERMRFLWQLLAEKQLALQSSKDLEKKENSADCETSQKRFPINILKEDPYILRYKALEEKLSLFQLGYVLYHIANHSNTAYENT

SEQ ID NO: 73 - protein, 1032 aa, Unknown
  uncultured Termite
MLYHIANHRGTDSVRSFLEYDDDKIKENTLTAKIAKETKKVIDAKKYRTFGEYLYKGKIEKFQQNIRKKVSNRKTPANKNKEFAVTRDVIIKETEKILASQKQYYTYILTDEYIKKIKDAISYQTEKLIPESGYCPYFKDEKRLPRSHKLNEYRRMYEALNNAKYFDPVLDENTGEILSYQEKEFSREEKKILFDEVLLKGMELTESGAKKLLYHLPDGCEVQLQGRDKTTQKIKGYALVDLEASPFWLRLSQQQQDEFLYDWNSLPLEKLKPKLTNYYSLTESEVDETFQEIKLPSNYASVGKKAMEILLTYIKDGCSYTEALEKAVSEGKLKVDKQTMIYDSLPYYGKILKESTQKLIGKAFSKQFADRNYKEPDTNKNEREFGKIANPVVHQTLNELRKLINEIITVFGKKPLEIGLETTRELKKSKKNREYLSKQQNKNEYARNRIYKEYIEPHLSQIKSRQENPSKYISKFELLEEQNFICPFCSEKITPDDIINSKVDVEHIFPIEESEDITKNNLVIAHNECNADKGKKSPFDAFGDKTSGKYRWNCILHNAQKNLPHKVWRFYQGSLEKFLENKPMSRRFGTDNSYISKIAARYLACLFNDPYHSEIFCIKSSLIAQLRIAWDLNSIMVPLVKNILSEKELEEFKISKNKKIRIDNRHHALDAIVIAYANRGYHNFLNRIHAKEYKINYREKSWLSKILLPPLNRDLEDFKISVKDSIEKANVSIKHDHNTNGSLVKATAYKVYYSGAGEYIITTSKNVEEISFKEKEDPKDTLYRALCKFECRDIDIKDEKLIKKLKYNSTLYKKVQNNLSKAKQELEQDNKKTEEEGKKSQKITEVRIYKKACSLVKGQYIQCGSRLKDKFFAVKEPTEIKTGLGYDTGDNLFLDLYYDKTGKLCGEIIRKVNFNRNKPNYQKEGYTLFERIYQSDILEVDTSEDRISLKNKTGSAPSDRTFIKVNTFTEVNAYFDGKRDKIQIFFGNLLKSSFKNDSFFISSMQKYNVRKVILTSLGIIKYRSQILKNKEV

SEQ ID NO: 74 - protein, 1032 aa, Unknown
  uncultured Termite
MKKRILGLDIGIASVGWALVEFDDEFQDNKKKGTIIKSGVRIFTRAETPKERESLAKPRREARSQRRRIRRRVERLNSIRELFVKNGVVEEWSVSKKNPNNIYITLNQIKTPWQLRMESLDRKLTNEQFAVVLTHLAKHRGYKSLRKDDKAGKVLEAISQNKKRLNDSDYRTLGEMFCKNESYKEHKRNKGGEYINSVARELIEEEVEKIFVKQREKGNNFADVNTEREYLKIAFSQKPAGSISKMVGFCTFENGEKRAPRDSYSAELFKVLCTINNTTFTDMKTGEIRSFSKEEIGKTLETVKNVKDVKYAKIRKDLGLEDSVKFSGVDYRENAKSKGEGEIFVSMKTYHEIKSKIEKLSKEKWDNLKGNTELLDSIVNIIANLKDDESIKKEFQKLKIDEDIIDVLLNFEFKKFINLSFKALRKIIPFQFQGQKYITASTSAGYSLKQEGIKNKLVPPAKENINVAVVARAFAQTRKVINAVIRKYGQFDQINIELATELKNSKFDRSKIEEGQKKFQSQKDKIFKEVQELRGGMTPSSSLLLKYRLWREQDERCVYSGRKISFEDLLDTGFLDIDHIIPYSKSMDDSFNNKVLCLAEENRNKKNDIPFNYYQRIDRDWNLLISIITSMKNMKIAKKSRLLKQELSDIEGFIERNINDTRYATRYIKDFLENNLEFKENEFIKVKVQARSGGLTSVLSYNWGMSKDREESYFHHAKDAIIVACSTQGMVQYISKISQQYENDKDKMKKIKDKTENCIPKPWDSFRADVEESIEGIFVSFAPRHKVTGSAHKETIYSKKHLEKERYVTVKKSLDKIKLSDLENIPCNENCGIIRVLKERLEKFKNDSLKAFADPVHMPTKCPNKKGPVIRSVKIKESNKTGIEVRKGLAERGEMVRVDVFIKDKKYYLVPIYVSDFKNKDLPNKAIAALKLENEWIMIDKTYSFKFSLFKDDLIKIKKKKEEIFGYFGGVHRSTGTIKIKSRHKPKEIDEGIGSRCLLDFRKFQVDVLGNYTEVKHEKRMPAYITRKDKKH

SEQ ID NO: 75 - protein, 1361 aa, Lactobacillus casei
MTKLGKPYGIGVDIGSNSIGFAAVDENSHLIRLKGKTVIGARLFEEGKAAADRRASRTTRRRLSRNRWRLSFLRDFFESHITPTGPNFFMRQKYSEISPKDKARYKYEKRLFNDRTDAEFYQQYPTMYHLRNRLLTDPSKADVREIYFAIHHILKSRGHFLTSGYAKDFNTNKVALNEIFPALQDAYAQVYPDLDITFDENKVNEFKTVLLNEKATPSDTQRALVNLLLAEDGDKDILKQQKQVLTEFAKAVVGLKTKLNVALGTEVDSSEATVWNFSLGQLDDKWAGIESAMTDEGTEILDQIRDLYRARLLNGIVPAGKTLSQAKVDDYAQHHEDLELFKDYLKQLEDDGTAKAIRQLYDRYIDGDDAKPFVREDFVKALTKEVTAHPNAKSPELLERLAQPDFMLKQRNKANGAIPVQMQQRELDQIIKNQSVYYDWLAAPNPVEKHRKSMPYQLDELLNFRIPYYVGPLVTAKEQKAAQGGVFAWMVRKDPDGNITPYNFDEKVDREASANTFIQRMKTTDTYLIGEDVLPKQSLLYQRYEVLNELNNVRVNNEKLSIEQKQQVIRELFERHNSVTIKQFAENLRAHGDYAHIPEIRGLADEKRFLSSLSTYRQLKSLLPDAIDDPAKQADIENIIAWSTVFEDAAIFKTKLKEINWLDSQTITKLSNIRYRGWGQFSHKFLNGLTLGNGHTIIQELFLSNNNLMQILTDETLQKKMTELNADKLKAANINDAIDDAYTSPSNKKALRQVLRVIEDIKRAADGQDPSWLYVETADGGGTPGKRTRARQHQLQEIYANAAHELIDSAVRGELEDKIADKADFNDRLVLYFMQGGRDIYTGTPLNIDQLSSYDIDHILPQSLIKDNSLDNRVLVHAIINREKNATFASTIYAQKMNATWRQWHEAGLISGRKLRNLQMRPDQIDKYASGFVARQLVETRQIIKLTEQIVAAQYPETKIIAVKAGLSHQLREELEFPKNRDVNHYHHAFDAFLAARIGTYLLKRFPNLQAFFTYGKFKKADVKKLRGFNFIRDITHAEDKIVVKDTGEVIWDKKRDVDELDRIYNFKRMLITHEVHFEKADLFKQTVYGAKDSKEAGGKKQLISKKKGYPVDIYGGYTQETGSYLSVVRLTKKAMYAVVKVSTRDAAKLAVAKSISEQKENETLNDIIDEKLSKISKNGKITHELFEVVLPRVGQKTLFKNSKYNLFLVNSDTYMHNYQELWMPREYQKMWKDISLSKYGDAQTEDQLDQIFGFIVSQVNSYFNLYDINQFRKKLNDAADKFATLPMRDTDDMQGKIATIGQLLIGLQANAARSDLRNLDIKTPLGLLQIPNGISLDSDTSVVYQSPTGLLEREVHLSDL

SEQ ID NO: 76 - protein, 1348 aa, Streptococcus equi
MKKPYTIALDIGTNSVGWVVVTDDYRVPTKKMKVLGNTERKTIKKNLIGALLFDSGDTAEGTRLKRTARRRYTRRKNRLRYLKEIFTEEMAKVDDGFFQRLEDSFYVLEDKEGNKHPIFANLADEVAYHKKYPTIYHLRKELVDNPQKADLRLIYLAVAHIIKFRGHFLIEGTLSSKNNNLQKSFDHLVDTYNLLFEEQRLLTEGINAKELLSAALSKSKRLENLISLIPGQKKTGIFGNIIALSLGLTPNFKANFGLSKDVKLQLAKDTYADDLDSLLAQIGDQYADLFLAAKNLSDAILLSDILTESDEITRAPLSASMVKRYREHHKDLVTLKTLIKDQLPEKYQEIFLDKTKNGYAGYIEGQVSQEEFYKYLKPILARLDGSEPLLLKIDREDFLRKQRTFDNGSIPHQIHLEELHAILRRQEVFYPFLKDNRKKIESLLTFRIPYYVGPLARGHSRFAWVKRKFDGAIRPWNFEEIVDEEASAQIFIEKMTKNDLYLPNEKVLPKHSLLYETFTVYNELTKVKYATEGMTRPQFLSADQKQAIVDLLFKTNRKVTVKQLKENYFKKIECWDSVEITGVEDSFNASLGTYHDLLKIIQDKDFLDNPDNQKIIEDIILTLTLFEDKKMISKRLDQYAHLFDKVVLNKLERHHYTGWGRLSGKLINGIRDKQSGKTILDFLKADGFANRNFMQLIHDSELSFIDEIAKAQVIGKTEYSKDLVGNLAGSPAIKKGISQTIKIVDELVKIMGYLPQQIVIEMARENQTTAQGIKNARQRMRKLEETAKKLGSNILKEHPVDNSQLQNDKRYLYYLQNGKDMYTGDDLDIDYLSSYDIDHIIPQSFIKNNSIDNKVLTSQGANRGKLDNVPSEAIVRKMKGYWQSLLRAGAISKQKFDNLTKAERGGLTQVDKAGFIQRQLVETRQITKHVAQILDSRFNTEFDDHNKRIRKVHIITLKSKLVSDFRKEFGLYKIRDINHYHHAHDAYLNAVVAKAILGKYPQLAPEFVYGDYPKYNSFKERQKATQKMLFYSNILKFFKDQESLHVNSDGEEIWNANKHLPIIKNVLSIPQVNIVKKTEVQTGGFYKESILSKGNSDKLIPRKNNWDTRKYGGFDSPTVAYSVLVIAKMEKGKAKVLKPVKEMVGITIMERTAFEENPVVFLEARGYREIQEHLIIKLPKYSLFELENGRRRLLASASELQKGNELFLPVDYMTFLYLAAHYHELTGSSEDVLRKKYFVDRHLHYFDDIIQMINDFAERHILASSNLEKINHTYHNNSDLPVNERAENIINVFTFVALGAPAAFKFFDATIDRKRYTSTKEVLNATLIHQSVTGLYETRIDLSQLGEN

SEQ ID NO: 77 - protein, 1341 aa, Ruminococcus lactaris
MGKGYYVGLDMGTGSVGWAVTDESYQILRRHGKAMWGVRLFESAKTAEERRMFRTGRRRLDRRGWRIEILQEIFAEEISRVDPGFFLRMKESKYYPEDKRDIQGNCPELPYTLFVDKTFTDKDFHKKYPTIYHLRKMLMETEDTPDMRLVYLALHHMMKHRGHFLLSGDISQVTEFKNTFNQFIENIRNEEMDFEIELDESAVQMIEETLKDKNLTRSAKKSKLVKGLNAKNVRDKAFLTLLSGGTVKLSDLFGMEELNEGERPKISFADNGYEEYAAVVEMELGELYYIVESAKAVYDWAILSDILGGSTSVSDAKVRAYEKHKADLKYLKAVVKEYFPKEVYNAVFVESSDKLNNYPAYIGMTKKNGKKVSLEGKRCSREEFMDFLKKNIVVKLPDEEAKMYLQSELEKDSFLPKQVNKDNGVIPYQVHKYELKKILDNLGDKIPFLKENAEKIEKLFSFRIPYYVGPLRTGNGENSKFAWAERKSTEKIYPWNFENVIDVEQSAENFIRRMTNKCTYLIGEDVLPKDSLLYSKFMVLNELNNLRLDGQKISVELKQKIYRDVFCRSRKVTQKKLKSYLIREGIAGKNVELTGIDGDFKGSLTAYHDFKEKLIDVELTQKEKEEIILNIVLFGDDKKLLKQRLKKKFPQLTEKQINTVTALSYKGWGRLSKKLLEEVTVPAPETGEVWNIITALWETNDNFMQLLSKEYQFSDRIEEFNEEKADPEVSYQTIEDLYVSPAVKRQIWQTLQIIQEIEKVMGEKPKRVFVEMAREKQENKRTESRKKTLSDLYTKCKKEEPEWIEALCTSLEKHEEHQLRSDKLYLYYTQKGRCMYSGEPIDLEDLWDNTKYDIDHIYPQSKTMDDSLKNRVLVKKEYNAKKSDTYPIAADIQKKMMPFWKSLLTGGFIPKEKYDRLVRNNPLDANELAGFIERQIVETRQSTKAVAEILKKILPDTEIVYVKAKTVSKFRQDFDFIKVRDMNDLHHAKDAYLNIVVGNVYFVKFTKNAAWFVKENPGRTYNLEKMFIWDVARDGEIAWKAGKSGSIVQVRAMMEKNHILVTRRSYEVKGGLFDQQILKKGKGQVPVKESDERLRDIGKYGGYNKAAGVYFMLVSSKDKKGKEQRTIEFVPIYLKDRVEKDMESARNYLMEERGLREPKILIKKIKIDTLFKVDGFYMWLSGRTSNQLIFKGANQLILSKEDMKTLKKVVKYIQRQKEDKNVKISMRDGITEEELLKLYETFLDKIRHSIYGARLSSQEKTLVNGKEKFIDLSVEAKCQVLYEILHLFQCQSGAANLKMIGGPASAGILVMNNNISKCKNISIVNQSPTGIYEKEIDLLRV

SEQ ID NO: 78 - protein, 1003 aa, Gluconacetobacter diazotrophicus
MIDESLTFGIDLGIGSCGWAVLRRPSAFGRKGVIEGMGSWCFDVPETSKERTPTNQIRRSNRLLRRVIRRRRNRMAAIRRLLHAAGLLPSTDSDALKRPGHDPWELRARGLDKPLKPVEFAVVLGHIAKRRGFKSAAKRKATNISSDDKKMLTALEATRERLGRYRTVGEMFARDPDFASRRRNREGKYDRTTARDDLEHEVHALFAAQRRLGQGFASPELEEAFTASAFHQRPMQDSERLVGFCPFERTEKRAAKLTPSFERFRLLARLLNLRITTPDGERPLTVDEIALVTRDLGKTAKLSIKRVRTLIGLEDNQRFTTIRPEDEDRDIVARTGGAMTGTATLRKALGEALWTDMQERPEQLDAIVQVLSFFEANETITEKLREIGLTLAVLDVLLTALDAGVFAKFKGAAHISTKAARNLLPHLEQGRRYDEACTMAGYDHAASRLSHHGQIVAKTQFNALVTEIGESIANPIARKALIEGLKQIWAMRNHWGLPGSIHVELARDVGNSIEKRREIEKHIEKNTALRARERREVHDLLDLEDVNGDTLLRYRLWKEQGGKCLYTGKAIHIRQIAATDNSVQVDHILPWSRFGDDSFNNKTLCLASANQQKKRSTPYEWLSGQTGDAWNAFVQRIETNKELRGFKKRNYLLKNAKEAEEKFRSRNLNDTRYAARLFAEAVKLLYAFGERQEKGGNRRVFTRPGALTAALRQAWGVESLKKQDGKRINDDRHHALDALTVAAVDEAEIQRLTKSFHEWEQQGLGRPLRRVEPPWESFRADVEATYPEVFVARPERRRARGEGHAATIRQVKERECTPIVFERKAVSSLKEADLERIKDGERNEAIVEAIRSWIATGRPADAPPRSPRGDIITKIRLATTIKAAVPVRGGTAGRGEMVRADVFSKPNRRGKDEWYLVPVYPHQIMNRKAWPKPPMRSIVANKDEDEWTEVGPEHQFRFSLYPRSNIEIIRPSGEVIEGYFVGLHRNTGALIPTPVGPDSYVIA

SEQ ID NO: 79 - protein, 1368 aa, Streptococcus pyogenes
MDKKYSIGLDIGTNSVGWAVITDDYKVPSKKFKVLGNTDRHSIKKNLIGALLFDSGETAEATRLKRTARRRYTRRKNRICYLQEIFSNEIAKVDDSFFHRLEESFLVEEDKKHERHPIFGNIVDEVAYHEKYPTIYHLRKKLADSTDKADLRLIYLALAHMIKFRGHFLIEGDLNPDNSDVDKLFIQLVQTYNQLFEENPINASRVDAKAILSARLSKSRRLENLIAQLPGEKRNGLFGNLIALSLGLTPNFKSNFDLAEDAKLQLSKDTYDDDLDNLLAQIGDQYADLFLAAKNLSDAILLSDILRVNTEITKAPLSASMIKRYDEHHQDLTLLKALVRQQLPEKYKEIFFDQSKNGYAGYIDGGASQEEFYKFIKPILEKMDGTEELLAKLNREDLLRKQRTFDNGSIPHQIHLGELHAILRRQEDFYPFLKDNREKIEKILTFRIPYYVGPLARGNSRFAWMTRKSEETITPWNFEEVVDKGASAQSFIERMTNFDKNLPNEKVLPKHSLLYEYFTVYNELTKVKYVTEGMRKPAFLSGEQKKAIVDLLFKTNRKVTVKQLKEDYFKKIECFDSVEISGVEDRFNASLGTYHDLLKIIKDKDFLDNEENEDILEDIVLTLTLFEDREMIEERLKTYAHLFDDKVMKQLKRRRYTGWGRLSRKLINGIRDKQSGKTILDFLKSDGFANRNFMQLIHDDSLTFKEDLQKAQVSGQGDSLHEHIANLAGSPAIKKGILQTVKVVDELVKVMGRHKPENIVIEMARENQTTQKGQKNSRERMKRIEEGIKELGSDILKEYPVETTQLQNEKLYLYYLQNGRDMYVDQELDINRLSDYDVDHIVPQSFLKDDSIDNKVLTRSDKNRGKSDNVPSEEVVKKMKNYWKQLLNAKLITQRKFDNLTKAERGGLSELDKAGFIKRQLVETRQITKHVAQILDSRMNTKYDENDKLIREVRVITLKSKLVSDFRKDFQFYKVREINNYHHAHDAYLNAVVGTALIKKYPKLESEFVYGDYKVYDIRKMIAKSEQEIGKATAKYFFYSNIMNFFKTEITLANGEIRKRPLIETNGETGEIVWDKGRDFATVRKVLSMPQVNIVKKTEVQTGGFSKESILPKRNSDKLIARKKDWDPKKYGGFDSPTVAYSVLVVAKVEKGKSKKLKSVKELVGITIMERSSFEKDPVDFLEAKGYKEVRKDLIIKLPKYSLFELENGRKRMLASAGELQKGNELALPSKYVNFLYLASHYEKLKGSPEDNEQKQLFVEQHKHYLDEIIEQISEFSKRVILADANLDKVLSAYNKHRDKPIREQAENIIHLFTLTNLGAPAAFKCFDTTIGRNRYKSIKEVLDATLIHQSITGLYETRIDLSQLGGD

SEQ ID NO: 80 - protein, 1504 aa, Bacteroides dorei
MKNIVGLDLGTNSIGWAVVNGSVNDDGSEQLVKIQASGSRIIPMDAAMIGDFNKGNSISQTAERTRLRGVRRLSERYLLRRERLHRILDILGFLPFHFAQDLDRHGKIVKGKEPKLAWRKNEAGQFEFIFQDSFKEMLEDFKLNYPNLITDDKKVPYDWTIYYLRKKGLTSKISKEELAWILLNFNQKRGYYQLRGEEEEENKDKLVEFYALKVVAVEDSGEKKGKDIWYNVHLENGWVYRRTSNMSLDWVGKTKEFIVTTDLEKDGTPKKDKEGNVKRSFRAPKEDDWSLVKKKTEADIDQTHKTVGAYIYDTLLGNPSQKIRGRLVRTIERKYYKEELKLILEKQKEFHLELQDRALYAACIEELYPINEAHRNNVGNRDFTYLFLEDILFYQRPLKSKKSLIDNCPYEENQGLDKETGEIKSFPVKCIAKSHPLFQEFRLWQFIINLRIYRKDLAQDVDVTNELLKTEEDYVALFDWLNGKKEIDQKAFLKYPVFGLKKEIENYRWNYVQDKPYPCNETRSLMLARLEKCDISIEFLTKENEEALWHILYSVEDKNEIVKALQKFADKHDLNASFVDVFQKFPPFKKEYGSYSAKAIKKLLPLMRMGKYWSENSIDKGTRERIDKIITGEYDEKIENRVREKAIHLADVSDFKGLPLWLVCYIVYGRHSEAKEIIQWKSPADIDSYLRSFKQHSLRNPIVEQIIIETLRVVRDIWKQVGNIDEIHVELGREMKNPADKRKKMTQQMSENENTNLRIKYLLTEFLNPEYEVENVRPYSPSQQDILRIYEEGVLNSVSDLPEEISDILKKFTETDLKKRPSRSEVLRYKLWLEQKYRSPYTGEVIPLGKLFTPAYEIEHVIPQSYYFDDSFSNKVICEAEVNKLKSNLLGHEFIVKHHGEIVELPFGKKVRIFTVDEYEQFVKDNYSRTRSKMKKLLMDDIPEEFVTRQLNDSRYISKVVKSLLSNIVREKGEEEAISKNVIPCTGGVTDRLKKDWGINEVWNKIILPRFQRLNELTGTNKFTTKNVGIQEIPTMPLELQKGFNKKRIDHRHHAMDAIIIACANRNIINYLNNKSATAKAELSRYDLQKMLCDKAKTDNNGNYKWVIRKPWASFTQDTYLALENIIVSFKQNLRVINKATNRFLHYNEEGKKIFVKQGKGDNWAIRKSMHKDTVFGEVNLRRIKTVALNEAMKNPQSIVVKDFKRKLLELWNLGFDAKRIKKYFEDNRETWSDINLSKIEVYYFSKDTKDRFFATRKPLDTSFDRKKIENNITDTGIQKILLRHLELKDNNPDIAFSPDGIDEMNRNIIQLNNGKYHQPIIKIRWYEQADKFAVGQTGNKSSKFVEAAKGTNLFFAVYESNILDKKTNTIIKKRNYATIPLNVAIERQKQGLPVAPEDENGNDPIFVLSPNDLVYLPTDDELANGIIAQPLDRGRIYKMVSSSGEQCFFIKHIVANVLVDKFEFSPLNKMERALTGEMIKMICIPIKVDRLGNVLESSSSYKK

SEQ ID NO: 81 - protein, 1426 aa, Capnocytophaga sputigena
MKNILGLDLGITSISFAHIVEDENKEKSEIKELGVRIVSLTTDEQSDFEKGKSITTNANRTLKHGARLNLDRYQQRRKYLIDLLQKANLITSSSILAENGKNTTHSTWQLRAKAVTERIEKEEFARVLLAINKKRGYKSSRKAKTEDEGQAIDGMAIAKRLYDENLTPGQLSLQLLQQNKKLLPDFYRSDLQREFDLVWNFQKQFYPDILTDSFYKELQGKGKDATSKAFSKRYHFDTAENKGSKESVRLQAYQWRAEAISKQLSKEEVAYVLTEINNNLNNASGYLGAISDRSKELYFNRQTVGQYLYAQLQENRHNSLKNKVFYRQDYLDEFERIWETQASFHKELTDELKKQIRDVVIFYQRKLKSQKGLISFCEFESKEIEIEKDGKTITKTIGARVVPKSSPLFQEFKIWQILNNVTCKRKGIRKKKSSAKSTELDLFNEPSQTIFSLDMECKQLLFDELNLKGDLKSDKVLKLLGYSPQEWEINYNQLEGNRTQKALYEAYLKIVEMEAHDVKDILQIKSAKDDWSLDESPLSASEIKEKVKDIFQALGICTKILYFDPLLPVKEFEKQDSYQLWHLLYSYESDDSTSGNETLYRILEKKYAFKREHARILANVALQDDYGSLSTKAIRKIYPNIKENQYSKACELAGYKHSKLSLTTEELEARELKNIIPLLKKNALRNPVVEKILNQMINVVNALIEKNSERDAEGKITKYFHFDEIRIELARELKKNAQKRYEMTQNINKAKLEHQKISEILQKKFGIKNPTKSDIIRYRLYQELEHNGYKELYTNAPIARDMLFSKNIEIEHIVPKARVFDDSFSNKTLTFHRINSNKGEYTAFDYITSLNSEEELNQYLTRVENAYKTKSISLTKYKNLLKKASEIGDGFINRDLRDTQYIAKKAKEILFQVTKNVLSTSGSITDRLREDWGLVDVMKELNMPKYQSLGLTEVEERKEGNKVTVIKNWTKRNDHRHHAMDALTVAFTKPSYIQYLNHLNARKDENNKNYSVILAIEEKETIKVPTNNGKNKRVFIEPIPNFRQVAKKHLEEIFISHKAKNKVVTKNVNKPAGTDKQQITLTPRGQLHKETIYGKYQYYVNKEEKVGVKFDERTITKVSNPLYREALLKRLQANDNDPKKAFTGKNALSKNPIYLDETKTKTLPEKVNLTYLEEDFSIRKDISPDNFKDLKSIEKVIDQGVKRILIKRLQDYDNDPKKAFVDLEKNPIWLNKEKGIAIKRVTISGVSNAQPLHIGKDHLGKTTLNKEGNEIPVDYVSTGNNHHVAIYRDKEGNLQEQIVSFFEAVVRTQQGLPIIDKTYKQEEGWQFLFTMKQNEMFVFPNATTGFNPAEIDLLDPKNKKLISPNLFRVQKIATKDYFFRHHLETNVETDNVLKNTTWKREGLSGLKDIVKVRINHLGDIVSIGEY

SEQ ID NO: 82 - protein, 1443 aa, Parabacteroides johnsonii
MIKLLYLEKLKQYTMKKILGLDLGTSSIGWALVNEAENSDEVSSIIKLGVRVNPLTVDEMQNFEKGKSITTNADRTLKRSMRRNLQRYKLRRDALIELLKKVGFITDKTILSEQGNRTTFETYRLRAKAAEEEISLKELARVLLMINKKRGYKSSRKAKGEEEGALIDGMEIAKKLYDEDLTPGQLCLQLLESGKKFFPDFYRSDLQEEFNKIWDFQKQFNLFSFCDVAKEEVKGKNKSQTWAILAKYFVETKKVNVWNEHEAQTENREEVYKLVGLKRTVKGEELKKENYRWRVQALTEQLDLEKIAVVLQEINGQISASSGYLGAISDRSKVLYFNRQTVGQYQMAELNKNPNMSLRNMVFYRQDYLDEFNVIWEKQAEFHKELTPELKKEIRDIIIFYQRRLKSQKGLISFCEFENREVVVEKEGKKQTKIIGCKVIPRSHPLFQEFKIWQTLNNIEVFVGEKKGKRKKSNVSSDLFGDTEDALITEGRRFLYQEEKKILAKELSIKKGLTKAEILRLLFENPQELDINFKQIDGNQTGFALFSAYSNMIEKYGYEPLDFKKPAEDLISQLKTVFTDLGWNTDLLFIDLDKENKEWEKQPYFRLWHLLYSFEGDNTPTGNGKLIEKIMQLCGIEKEYAIELANVSLQDDYGSLSAKAIKKILLYLKEGNQYDMACEYAGYRHSKSSLTKEEIENKVLKDKLEILPKNSLRNPVVEKILNQMVNVINTVMEVYGRPDEIRVELARELKKSAKEREELTKAVAKNTREHEEIRKVLQSEFGMINVSRNDIIRYKLYEELKDNGYKTLYSNQYIPREKLFSKEIDIEHIIPQSRLFDDSLSNKTLEYKSINIEKGNKTAYDFVKEKYGEEGLQQYLNRCENLCKDKKAKLRKLKMELNEIPDGFIDRDLRNTQYIAKKALSMLTEICRRVVATTGSITDKLREDWQLVDVMKELNLPKYEALGLVEVYEDKDGRKIKRIKDWTKRNDHRHHAMDALTVAFTKDVFIQYFNNKNAAWESDSKEHTNIVGIKTRYFESGKAVPPIPLGQFRVEAKCHLENLLVSIKAKNKVVTTNVNCIKKKGGTYKNTQQTPRGQLHLETIYGSHNQYVTKIEKVNASFDAVKIATVSKQDYRNALLKRLEVFGNDPKKAFTGKNSLEKNPIYLDRAQTIQVPDKVQTVELETAYTIRKPVDPTLNVDKVVDKKIRLILEQRLKEYGGDAKKAFVNLDENPIWLNEEKGISIKRVTIRGISKAQALHDKKDKDGNFILDETGKRIPVDFVNTGNNHHVAIYRKPVLDKKGQVIFDDEGNPMYELDEDVVPFFEAVTRANLGIPIIDKDYKKSEGWQFLFSMKQNEYFVFPNEKTGFNPKEVDLLDPDNYAMISPNLFRVQKIGLNDYTFRHHLETTIQNDLKFITWIRCGKSGIKDIVKVRINHIGQIVSVGEY

SEQ ID NO: 83 - protein, 984 aa, Campylobacter jejuni
MARILAFDIGISSIGWAFSENDELKDCGVRIFTKVENPKTGESLALPRRLARSARKRLARRKARLNHLKHLIANEFKLNYEDYQSFDESLAKAYKGSLISPYELRFRALNELLSKQDFARVILHIAKRRGYDDIKNSDDKEKGAILKAIKQNEEKLANYQSVGEYLYKEYFQKFKENSKEFTNVRNKKESYERCIAQSFLKDELKLIFKKQREFGFSFSKKFEEEVLSVAFYKRALKDFSHLVGNCSFFTDEKRAPKNSPLAFMFVALTRIINLLNNLKNTEGILYTKDDLNALLNEVLKNGTLTYKQTKKLLGLSDDYEFKGEKGTYFIEFKKYKEFIKALGEHNLSQDDLNEIAKDITLIKDEIKLKKALAKYDLNQNQIDSLSKLEFKDHLNISFKALKLVTPLMLEGKKYDEACNELNLKVAINEDKKDFLPAFNETYYKDEVTNPVVLRAIKEYRKVLNALLKKYGKVHKINIELAREVGKNHSQRAKIEKEQNENYKAKKDAELECEKLGLKINSKNILKLRLFKEQKEFCAYSGEKIKISDLQDEKMLEIDHIYPYSRSFDDSYMNKVLVFTKQNQEKLNQTPFEAFGNDSAKWQKIEVLAKNLPTKKQKRILDKNYKDKEQKNFKDRNLNDTRYIARLVLNYTKDYLDFLPLSDDENTKLNDTQKGSKVHVEAKSGMLTSALRHTWGFSAKDRNNHLHHAIDAVIIAYANNSIVKAFSDFKKEQESNSAELYAKKISELDYKNKRKFFEPFSGFRQKVLDKIDEIFVSKPERKKPSGALHEETFRKEEEFYQSYGGKEGVLKALELGKIRKVNGKIVKNGDMFRVDIFKHKKTNKFYAVPIYTMDFALKVLPNKAVARSKKGEIKDWILMDENYEFCFSLYKDSLILIQTKDMQEPEFVYYNAFTSSTVSLIVSKHDNKFETLSKNQKILFKNANEKEVIAKSIGIQNLKVFEKYIVSALGEVTKAEFRQREDFKK

SEQ ID NO: 84 - protein, 1082 aa, Neisseria meningitidis
MAAFKPNPINYILGLDIGIASVGWAMVEIDEDENPICLIDLGVRVFERAEVPKTGDSLAMARRLARSVRRLTRRRAHRLLRARRLLKREGVLQAADFDENGLIKSLPNTPWQLRAAALDRKLTPLEWSAVLLHLIKHRGYLSQRKNEGETADKELGALLKGVADNAHALQTGDFRTPAELALNKFEKESGHIRNQRGDYSHTFSRKDLQAELILLFEKQKEFGNPHVSGGLKEGIETLLMTQRPALSGDAVQKMLGHCTFEPAEPKAAKNTYTAERFIWLTKLNNLRILEQGSERPLTDTERATLMDEPYRKSKLTYAQARKLLGLEDTAFFKGLRYGKDNAEASTLMEMKAYHAISRALEKEGLKDKKSPLNLSPELQDEIGTAFSLFKTDEDITGRLKDRIQPEILEALLKHISFDKFVQISLKALRRIVPLMEQGKRYDEACAEIYGDHYGKKNTEEKIYLPPIPADEIRNPVVLRALSQARKVINGVVRRYGSPARIHIETAREVGKSFKDRKEIEKRQEENRKDREKAAAKFREYFPNFVGEPKSKDILKLRLYEQQHGKCLYSGKEINLGRLNEKGYVEIDHALPFSRTWDDSFNNKVLVLGSENQNKGNQTPYEYFNGKDNSREWQEFKARVETSRFPRSKKQRILLQKFDEDGFKERNLNDTRYVNRFLCQFVADRMRLTGKGKKRVFASNGQITNLLRGFWGLRKVRAENDRHHALDAVVVACSTVAMQQKITRFVRYKEMNAFDGKTIDKETGEVLHQKTHFPQPWEFFAQEVMIRVFGKPDGKPEFEEADTPEKLRTLLAEKLSSRPEAVHEYVTPLFVSRAPNRKMSGQGHMETVKSAKRLDEGVSVLRVPLTQLKLKDLEKMVNREREPKLYEALKARLEAHKDDPAKAFAEPFYKYDKAGNRTQQVKAVRVEQVQKTGVWVRNHNGIADNATMVRVDVFEKGDKYYLVPIYSWQVAKGILPDRAVVQGKDEEDWQLIDDSFNFKFSLHPNDLVEVITKKARMFGYFASCHRGTGNINIRIHDLDHKIGKNGILEGIGVKTALSFQKYQIDELGKEIRPCRLKKRPPVR

SEQ ID NO: 85 - protein, 1021 aa, Clostridium cellulolyticum
MKYTLGLDVGIASVGWAVIDKDNNKIIDLGVRCFDKAEESKTGESLATARRIARGMRRRISRRSQRLRLVKKLFVQYEIIKDSSEFNRIFDTSRDGWKDPWELRYNALSRILKPYELVQVLTHITKRRGFKSNRKEDLSTTKEGVVITSIKNNSEMLRTKNYRTIGEMIFMETPENSNKRNKVDEYIHTIAREDLLNEIKYIFSIQRKLGSPFVTEKLEHDFLNIWEFQRPFASGDSILSKVGKCTLLKEELRAPTSCYTSEYFGLLQSINNLVLVEDNNTLTLNNDQRAKIIEYAHFKNEIKYSEIRKLLDIEPEILFKAHNLTHKNPSGNNESKKFYEMKSYHKLKSTLPTDIWGKLHSNKESLDNLFYCLTVYKNDNEIKDYLQANNLDYLIEYIAKLPTFNKFKHLSLVAMKRIIPFMEKGYKYSDACNMAELDFTGSSKLEKCNKLTVEPIIENVTNPVVIRALTQARKVINAIIQKYGLPYMVNIELAREAGMTRQDRDNLKKEHENNRKAREKISDLIRQNGRVASGLDILKWRLWEDQGGRCAYSGKPIPVCDLLNDSLTQIDHIYPYSRSMDDSYMNKVLVLTDENQNKRSYTPYEVWGSTEKWEDFEARIYSMHLPQSKEKRLLNRNFITKDLDSFISRNLNDTRYISRFLKNYIESYLQFSNDSPKSCVVCVNGQCTAQLRSRWGLNKNREESDLHHALDAAVIACADRKIIKEITNYYNERENHNYKVKYPLPWHSFRQDLMETLAGVFISRAPRRKITGPAHDETIRSPKHFNKGLTSVKIPLTTVTLEKLETMVKNTKGGISDKAVYNVLKNRLIEHNNKPLKAFAEKIYKPLKNGTNGAIIRSIRVETPSYTGVFRNEGKGISDNSLMVRVDVFKKKDKYYLVPIYVAHMIKKELPSKAIVPLKPESQWELIDSTHEFLFSLYQNDYLVIKTKKGITEGYYRSCHRGTGSLSLMPHFANNKNVKIDIGVRTAISIEKYNVDILGNKSIVKGEPRRGMEKYNSFKSN

SEQ ID NO: 86 - protein, 1131 aa, Acidovorax ebreus
MAQHVFGLDIGIASVGWAILGEQRIIDLGVRCFDKAETAKEGDPLNLTRRQARLLRRRLYRRAWRLTQLSRLLKRKGLIADAKLFAKAPSYGDSAWELRRQGLDRLLTPLEWARVIYHQCKHRGFHWTSKAEEAKADSDAEGGRVKQGLAHTKALMQAKNYRSAAEMVLAEFPDAQRNKRGQYDKALSRVLLGEELALLFATQRRLGNPHASDFFEKLILGDGDRKSGLFWQQKPALSGADLLKMLGKCTFEKGEYRAPKASFSVERHVWLTRLNNLRIVVDGRSRPLNEAERQAALLLPYQTETSKYKTLKNAFIKAGLWGDGVRFGGLAYPSQAQIDAEKTKDPEDQFLVKLPAWHELRKAFKAAGHEALWQQISTPALDGDPTLLDQIATVLSVYKDGAEVVQQLRQLALPEPAASIAVLEKISFDKFSSLSLKALRRIVPLMQSGLRYDEAVAQIPEYGHHSQRIEPGAAKHLYLPPFYEAQRKYAGKGDHIGSMQFRDDADIPRNPVVLRALNQARKVVNALIREYGSPIAVNIEMARDLSRPLDERNKVKRAQEEFRDRNDRARSEFERDFGYKPKAAAFEKWMLYREQLGQCAYSQQPLDIQRVLDDHNYAQVDHALPYSRSYDDSKNNKVLVLTHENQNKGNRTAFEYLTSFPDGEDGERWRTFVAWVQGNKAYRMAKRNRLLRKNYGVDESKGFIDRNLNDTRYICKFFKNYVEEHLQLAARADGDTARRCVVVNGQLTAFLRARWGLTKVRGDSDRHHALDAAVVAACTHGMVKALADYSRRKEISFLQEGFPDPETGEILNPAAFDRARQHFPEPWTHFAHELKARLFTDDLAALREDMQRLGSYTTEDLGRLRTLFVSRAPQRRSGGAVHKETIYAQPESLKQQGGVIEKILLTSLKLQDFDKLLNPESNDHFVEPHRNERLYAAIRQRLEQFGGRADKAFGPDNLFHKPDKNNQPTGPVVRSIKLVRGKQTGIPIRGGLAKNDSMLRVDIFTKAGKFHLVPVYVHHRVTGLPNRAIVAFKDEDEWTLIDESFAFLFSVYPNDYVKVTLKKEQQSGYYSGADRSTGAMNLWAHDRAASVGKDGLIRGIGVKTALSVEKFNVDVLGRIYLAPPETRSGLA

SEQ ID NO: 87 - protein, 1122 aa, Streptococcus suis
MSNGKILGLDIGIASVGVGVIDAQTGEIIHASSRIFPSANAANNAERRTFRGSRRLIRRKKHRIKRLDDLFNDFHINLDGEMSTDNPYVLRVKGLSQKLTVEELYISIKNIMKRRGISYLDDAESDNEAGRSDYAKAIERNRQLLTSKTPGEIQLERLEKYGQLRGNFTIIDEEGQSQQIINVFSTSDYVKEVEKILDCQKMYHKFISDEFCDKLIELLREKRKYYVGPGNEKSRTDYGIYRTDGTTLENLFGILIGKCTFYPDQYRSSRASYTAQEFNFLNDLNNLTVPTETKKLSQEQKEFLVNYAKETSVLGAGKILQQIAKLADCKVEDIRGYRLDNKDKPELHTFETYRAMKGLVPLVDIGVLSREQLDILADILTLNTDFEGIREALKKQLPNVFDEKQVKGLASFRKSKSQLFAKGWHNLSQKIMLEVIPELYATSDEQMTILTRLGKFEKSSVAEYPSSINVDEITDEIYNPVVAKSIRQTIKIINASIKKWGEFDQIVIEMPRDRNEDEEKKRIADGQKANAKEKADSILRAAELYCAGKVLPDYVYNGHNQLATKIRLWYQQGERCIYTGQPISIHDLIHNQNQYEIDHILPLSLTFDDSLSNKVLVLATANQEKAQRTPYNYLKSATSAWSYREFKDYVTKRKGIGKKKCEYLTFEEDINGFEVRSKFIQRNLVDTRYASKVILNALQDYFKISGIQTKVSVVRGQFTSQLRHKWGIEKTRETYHHHAVDALIIAASSQLRLWKKQESPLVVDYQEGRQVDLETGEILELTDEQYKELVYQPPYQGFVNTISSSAFDNEILFSYQVDSKVNRKISDATIYATRNAQLGKDKTEGIYVLGKIKDIYTQAGYEAFLKRYTKDKTSFLMYHKDLDTWEKVIEIILRDYREYDEKGKEIGNPFERYRRENGYVKKYSRKGNGTAIKSLKYYDNKLGNHIDITPENSRNAVVLQSLKPWRTDVYFNKETGKYEFLGIKYSDLSFEKGTGEYGISQEKYDSIKIAEGVAKKSIFKFTLYKQDLLFIKDIENNFGKLLRFTSKNDTSKHYVELKPYDKNKFGTEEPLLPVLGNVAKSGQCIKGLNKSNISIYKVRTDILGYRHFIKQEGEHPQLKFKK

SEQ ID NO: 88 - protein, 1509 aa, Unknown
  Bacteroides coprophilus
MKKTLGLDLGTNSIGWAVINSNIDSEGKEKLVGISSCGSRIIPMDATTLGDFGKGNTKSPVAERTRLRGIRRLLERSLLRRERLHRVLSVMGFLPEHYASQLDRYGKFLPETEPKLAWYKDDSGRYQFLFQKSFHEMLEDFRQHQPELVAGEKKIPYDWTIYYLRKKALSQEITKEELAWILLNFNQKRGYYQLRGEEEQEENNKSVEYHALKVVSVEDSGERKGKDIWYNVTLENGWVYRRASNIPLDWTGKVKEFVVTTELDDAGNPKKDKEGNVKRSFRAPKEDDWGLLKTRTQAQIDESGKTVGTYIYESLLCMPNQKIRGKLVRTIERKYYKDELRQILVKQSEFHAALQDHNLLLSCIEELYPNNEAHRRLLSASSFIYFLIEDILFYQRPLKSQKGLIDNCPYESHIYKDKKDGSLHHVPLKCVSKSHPLFQEFRLWQFLSNLRIYQRERMMDGSLKLDVDVTREFLPSEEDYVKLFDWLNERKEISQKFLLAYKPFGLKKNEQANYRWNYVEDKSYPCNETRAEIKSRLSKAGVPEEFLTEEKEEALWHILYSISDKKELTKALGTFAAKNCLNESFVEVFAKIPPFESNYAAYSLKAIRKLLALMRMGKYWNEQAIDRQTRDRIEKILTGEYDETIRSRVREKAMLLTDISSFRGLPLWLACYIVYDRHSESKELVKWETPADIDHFLSKFKQNSLRNPIVEQVITESLRTVRDIWKQEGKIDEIHVELGREMKNPAKERARITAQVQENENTNLRIKALLAEFMNPEFEIENVHPYSPGQQEILRIYEDGVLSGIAEKDLPDDITAILKKFRENDVKKRPTTSEVLRYKLWLEQRYRSPYTGRVIPLGKLFTPAYEIEHVIPQSRYFDDSISNKVICESAVNKLKDNCLGYEFIKKHSGEMVELGNGETVPVFSVEEYERFVKESYFGNSKKMKKLLLEDIPDSFIERQLNDSRYISRVVTSLLSNLVCEEGEQDGLSKNVIVCTGGITDRLKKDWGVQEVWNRIILPRFLRLNEITGRTDFTSTSVNGHLLPALPLYLQKGFNKKRIDHRHHAMDAIVIACANRNIVNYLNNSSARKNSEISRYDLQRLLCEKVKTDANGNYKWILRKPWETFTQDVYAALTNIVVSFKQNLRVINRTTNYYQHYNEAGEKRMIPQTKGDRWAIRKPMHKDTVYGEVNLRKEKTLPLRDVVKNPSIVVDKSLKNKLYELLKSQYDLKAIAKYFETHQDVWADVNLKKIKVYYFTKETNERFFATRKSLDPSFDQKKIEEEVTDTGVQKILLHHLQQNNNDPDMAFSPDGIDRMNQNMTILNDGKWHQPIYKVRTYEKADKFAVGESGNKAKKFVEAAKGTNLFFAVYESVQEDEAIGKQVCKRTFATIPLNEVIKRKKQGLPAAPEDLNGNLPKFVLSPNDLVYLPTEEERNSSRIIQPLDRERIYKMVSSSGSQCFFIKVFVANSIWDKNEYSSLNKMERAITNEMIKEICVPIKIDRLGNVSLIQI

SEQ ID NO: 89 - protein, 1219 aa, Unknown
  Bacteroides cellulosilyticus
MKEEVRGKNRSQTWAILAKFFVWSEKESVWNEKEARTEERVKEYKLVGLKRDTKGNELKLENYRWRVQALSEQLNPEIVAIVLQEINGQISASSGYLGAISDRSKQLYFNRQTVGQYLMSELEKDPNVSLRNRVFYRQDYLDEFDRIWEKQAEFHEELTVELKKEIRDIIIFYQRRLKSQKGLISFCEFEKREVVVEEDGRKKNKTVGCRVIPRSHPLFQEFKIWQTLNDIEVFAWDKQSKRKKADKSSILFDNSEDALLVEGKRFLYQEEKELLAKELFVKESMKKAEVLKLLFENYQELDLNFKQIDGNHTGFALFSAYSKMIEKYGYEPVDFKRSADEIIEKLETIFTNLGWNTELLSIDLSKEDKELERQSYFRLWHLLYSFEGDNTPTGNGKLLEKIMQLCDVEKEYAVELANVSFQEDYGSLSAKAIKKILPYLKEGNQYDVACDYAGYRHSRSSLTKDEIENKILKDKLEILPKNSLRNPVVEKILNQMVNLINTLIDTYGKPDEIRVELARELKKNAKEREELTKSIARNTREHDEIRQLLRTEFGMMNVSRNDIIRYKLYEELKDNGYKTLYSNEYIPREKIFSKEIDIEHVIPQARLFDDSLSNKTLEYRAINIEKGNKTAYDFVKEKYGNDGLEKFLNRCETLFKDKRTKLRKLKMEEKDIPEGFIDRDLRNTQYISKKAFAMLNEISRRVVATTGSITDKLREDWQLVDLMKELNLPKYEKLGMVEMFEDKDGRKIKKITDWTKRNDHRHHAVDALTVAFTKDVFIQFYNNKNAAWMPASKEHANITGIKARYFENGKALAPMPLAQFRAEAKRHLENLLVSIKAKNKVITSNVNRTKNKNGENRKLQQTPRGQLHLETVYGSHRQYATKIEKVNAAFDVTKIATVSKLAYRNALLKRLEAFGNDPKKAFTGKNTLEKNPLYLDENQTEMVPEKVQTVEFETVYTIRKPIDPNLSIDKVVDVKIRSVLEKRLKEYGGDAKKAFVNLDENPIWLNEAKGISIKRVSIRGISNAQSLHEKKDKDGNLILGKEGRKIPVDFVNTGNNHHVAIYKKPVLDKVGQVVLDEEGNPKYELDEVVVSFFDAVTRANLGQPIIDKDYRRSEGWQFLFSMKQNEYFVFPNDKTGFNPKEVDLLNPENYALISPNLFRVQKFAYKNYVFRHHLETTIKDTSSTLKGITWTDFRSSKGLDKIVKVRVDHIGQIVSIGEY

SEQ ID NO: 90 - protein, 1329 aa, Unknown
  Catenibacterium mitsuokai
IVDYCIGLDLGTGSVGWAVVDMNHRLMKRNGKHLWGSRLFSNAETAANRRASRSIRRRYNKRRERIRLLRAILQDMVLEKDPTFFIRLEHTSFLDEEDKAKYLGTDYKDNYNLFIDEDFNDYTYYHKYPTIYHLRKALCESTEKADPRLIYLALHHIVKYRGNFLYEGQKFNMDASNIEDKLSDIFTQFTSFNNIPYEDDEKKNLEILEILKKPLSKKAKVDEVMTLIAPEKDYKSAFKELVTGIAGNKMNVTKMILCEPIKQGDSEIKLKFSDSNYDDQFSEVEKDLGEYVEFVDALHNVYSWVELQTIMGATHTDNASISEAMVSRYNKHHDDLKLLKDCIKNNVPNKYFDMFRNDSEKSKGYYNYINRPSKAPVDEFYKYVKKCIEKVDTPEAKQILNDIELENFLLKQNSRTNGSVPYQMQLDEMIKIIDNQAEYYPILKEKREQLLSILTFRIPYYFGPLNETSEHAWIKRLEGKENQRILPWNYQDIVDVDATAEGFIKRMRSYCTYFPDEEVLPKNSLIVSKYEVYNELNKIRVDDKLLEVDVKNDIYNELFMKNKTVTEKKLKNWLVNNQCCSKDAEIKGFQKENQFSTSLTPWIDFTNIFGKIDQSNFDLIENIIYDLTVFEDKKIMKRRLKKKYALPDDKVKQILKLKYKDWSRLSKKLLDGIVADNRFGSSVTVLDVLEMSRLNLMEIINDKDLGYAQMIEEATSCPEDGKFTYEEVERLAGSPALKRGIWQSLQIVEEITKVMKCRPKYIYIEFERSEEAKERTESKIKKLENVYKDLDEQTKKEYKSVLEELKGFDNTKKISSDSLFLYFTQLGKCMYSGKKLDIDSLDKYQIDHIVPQSLVKDDSFDNRVLVVPSENQRKLDDLVVPFDIRDKMYRFWKLLFDHELISPKKFYSLIKTEYTERDEERFINRQLVETRQITKNVTQIIEDHYSTTKVAAIRANLSHEFRVKNHIYKNRDINDYHHAHDAYIVALIGGFMRDRYPNMHDSKAVYSEYMKMFRKNKNDQKRWKDGFVINSMNYPYEVDGKLIWNPDLINEIKKCFYYKDCYCTTKLDQKSGQLFNLTVLSNDAHADKGVTKAVVPVNKNRSDVHKYGGFSGLQYTIVAIEGQKKKGKKTELVKKISGVPLHLKAASINEKINYIEEKEGLSDVRIIKDNIPVNQMIEMDGGEYLLTSPTEYVNARQLVLNEKQCALIADIYNAIYKQDYDNLDDILMIQLYIELTNKMKVLYPAYRGIAEKFESMNENYVVISKEEKANIIKQMLIVMHRGPQNGNIVYDDFKISDRIGRLKTKNHNLNNIVFISQSPTGIYTKKYKL

SEQ ID NO: 91 - protein, 1152 aa, Unknown
  Roseburia inulinivorans
MNAEHGKEGLLIMEENFQYRIGLDIGITSVGWAVLQNNSQDEPVRITDLGVRIFDVAENPKNGDALAAPRRDARTTRRRLRRRRHRLERIKFLLQENGLIEMDSFMERYYKGNLPDVYQLRYEGLDRKLKDEELAQVLIHIAKHRGFRSTRKAETKEKEGGAVLKATTENQKIMQEKGYRTVGEMLYLDEAFHTECLWNEKGYVLTPRNRPDDYKHTILRSMLVEEVHAIFAAQRAHGNQKATEGLEEAYVEIMTSQRSFDMGPGLQPDGKPSPYAMEGFGDRVGKCTFEKDEYRAPKATYTAELFVALQKINHTKLIDEFGTGRFFSEEERKTIIGLLLSSKELKYGTIRKKLNIDPSLKFNSLNYSAKKEGETEEERVLDTEKAKFASMFWTYEYSKCLKDRTEEMPVGEKADLFDRIGEILTAYKNDDSRSSRLKELGLSGEEIDGLLDLSPAKYQRVSLKAMRKMQPYLEDGLIYDKACEAAGYDFRALNDGNKKHLLKGEEINAIVNDITNPVVKRSVSQTIKVINAIIQKYGSPQAVNIELAREMSKNFQDRTNLEKEMKKRQQENERAKQQIIELGKQNPTGQDILKYRLWNDQGGYCLYSGKKIPLEELFDGGYDIDHILPYSITFDDSYRNKVLVTAQENRQKGNRTPYEYFGADEKRWEDYEASVRLLVRDYKKQQKLLKKNFTEEERKEFKERNLNDTKYITRVVYNMIRQNLELEPFNHPEKKKQVWAVNGAVTSYLRKRWGLMQKDRSTDRHHAMDAVVIACCTDGMIHKISRYMQGRELAYSRNFKFPDEETGEILNRDNFTREQWDEKFGVKVPLPWNSFRDELDIRLLNEDPKNFLLTHADVQRELDYPGWMYGEEESPIEEGRYINYIRPLFVSRMPNHKVTGSAHDATIRSARDYETRGVVITKVPLTDLKLNKDNEIEGYYDKDSDRLLYQALVRQLLLHGNDGKKAFAEDFHKPKADGTEGPVVRKVKIEKKQTSGVMVRGGTGIAANGEMVRIDVFRENGKYYFVPVYTADVVRKVLPNRAATHTKPYSEWRVMDDANFVFSLYSRDLIHVKSKKDIKTNLVNGGLLLQKEIFAYYTGADIATASIAGFANDSNFKFRGLGIQSLEIFEKCQVDILGNISVVRHENRQEFH

SEQ ID NO: 92 - protein, 686 aa, Unknown
  Coprococcus comes
MKKQDSPKNNMGYTAYNLNVLGYEEFAKRVELLFKDTDAVKRLNDSHMQMAEGFDLNALPGSPALRRGVSQAIKVLDDIVSVAGKAPDRIYLKVTRTASNSRKGKRTAKRSDKIKQALKALDADAAADLGAAKLLRELGMFDEKEINERIYLYFHQAGKCLYTGKPIDITRIASNDYYVDHVVPLAYRKDESLDNKVLVYAEASRYKSETLLVSPAVQRKMLPFWRMLRNAGLMSERKLNALIRTEISEGMLKSIIGRQFTENSWEAKLFTAAIAAKYPGTVVIPVKAGVIGAVRSRIGIPKSLKANQFYHAHDALLAAEVGRYMELAKPAFVHNRVKYEQYMRKIKLVNEENKKAPKSQLDFFAGGFFFDRVDKDTGEVYWNKDEEVERIYRACGWKNLRVTYAAFEDGGAFWKQTIYSPREKSKLIATKSDRPAEIYGGYSSQTFANFFVYEVMKKKVKQLRFGAVPAAIASKSDPDTYNAMLEMYARGLAKTAKEKFVRIVRARVLKNTMIELYGERFRIAGEKQVYPVRQMPLAIDEVYLLKGVETIAAAGNAGASAKIDFEKAAESLVGFWDLLLEKLPVNYPKLTVQLKLGLLKHPKDILAATSESEFPAIVYKIAEAEIQVMEQASGLRNMSDTKILGGNTFGGSLVFTFNKVLNDPKSKACFIDTTPAGLYEVKTKIW

SEQ ID NO: 93 - protein, 1105 aa, Unknown
  Actinomyces coleocanis
MDNKNYRIGIDVGLNSIGFCAVEVDQHDTPLGFLNLSVYRHDAGIDPNGKKTNTTRLAMSGVARRTRRLFRKRKRRLAALDRFIEAQGWTLPDHADYKDPYTPWLVRAELAQTPIRDENDLHEKLAIAVRHIARHRGWRSPWVPVRSLHVEQPPSDQYLALKERVEAKTLLQMPEGATPAEMVVALDLSVDVNLRPKNREKTDTRPENKKPGFLGGKLMQSDNANELRKIAKIQGLDDALLRELIELVFAADSPKGASGELVGYDVLPGQHGKRRAEKAHPAFQRYRIASIVSNLRIRHLGSGADERLDVETQKRVFEYLLNAKPTADITWSDVAEEIGVERNLLMGTATQTADGERASAKPPVDVTNVAFATCKIKPLKEWWLNADYEARCVMVSALSHAEKLTEGTAAEVEVAEFLQNLSDEDNEKLDSFSLPIGRAAYSVDSLERLTKRMIENGEDLFEARVNEFGVSEDWRPPAEPIGARVGNPAVDRVLKAVNRYLMAAEAEWGAPLSVNIEHVREGFISKRQAVEIDRENQKRYQRNQAVRSQIADHINATSGVRGSDVTRYLAIQRQNGECLYCGTAITFVNSEMDHIVPRAGLGSTNTRDNLVATCERCNKSKSNKPFAVWAAECGIPGVSVAEALKRVDFWIADGFASSKEHRELQKGVKDRLKRKVSDPEIDNRSMESVAWMARELAHRVQYYFDEKHTGTKVRVFRGSLTSAARKASGFESRVNFIGGNGKTRLDRRHHAMDAATVAMLRNSVAKTLVLRGNIRASERAIGAAETWKSFRGENVADRQIFESWSENMRVLVEKFNLALYNDEVSIFSSLRLQLGNGKAHDDTITKLQMHKVGDAWSLTEIDRASTPALWCALTRQPDFTWKDGLPANEDRTIIVNGTHYGPLDKVGIFGKAAASLLVRGGSVDIGSAIHHARIYRIAGKKPTYGMVRVFAPDLLRYRNEDLFNVELPPQSVSMRYAEPKVREAIREGKAEYLGWLVVGDELLLDLSSETSGQIAELQQDFPGTTHWTVAGFFSPSRLRLRPVYLAQEGLGEDVSEGSKSIIAGQGWRPAVNKVFGSAMPEVIRRDGLGRKRRFSYSGLPVSWQG

SEQ ID NO: 94 - protein, 1361 aa, Anaerococcus tetradius
MGNYYLGLDIGTNSVGWAVTDENYNIERFKKKNMWGIRLFDEAKTAESRRIHRQARRMRQRKIQRLNLLMELFDVEISKVDESFFIRKKESDLHYEDKSQDSRYALFNDKEFNDKDYHNKYPTIFHLIMDLIENDEKKDIRLLYLACHYLIKNRGHFIFEGQKFDVNSSLNNNINKLKSHLDQFYNICLDFDNDKLIEILVNQNLNISEKSKKIKELLRKTNLEVGIANLIAGGSIKLSNMFDDDELKNLDYNSLSFKNSNFDEGRELFEEVLEDRFELVEILKDIHDASVLETMLSSASISPDGGKYISSSMINSYNKHKRDLKLLKKIIKKYKKSEYDNIFRDENIKNNYLSYTRTGINKNKKVQAEDNTDSDGFYKYIVKILKDIKENDSDEDIKYILSEIDKKNFVPKQRTKENSVIPYQLREIELRKIIDNQSKYHKFLNEVDEKGISVKEKIISLLTFRIPYYIGPLNPSYNEEKNFTTSWVKRLAKGKVTPWNFEDMVDIDASREAFIENKLNKCSFLLDETVLPKDSLLYQEYMVLNELNNLKINGQSINTDLKKSIYEELFKKYKKVTRKRLISYIKEKENMSGDIVITGIDGDFKQGLKSYIAFKDIIGEKIDDDIYRKEVEKIIRDISLYGDDKSFIQKKIKNENKLDLSDDQISKIAKLKFKDWGRFSKKLLVGIKASDKNTGEIDNIIGFMRNYNYNIMQLMANVFTFKDEIEKLNSKYYTDEKINIDYLDDLYLSSPAKRMLWQSFQIVDEIKNIKNSDPKKIFIEMARSKEDKPTRKMSRKSRLEKLYTDSKKQFIKLFGPDEYDKLNNEIKNKSESDFRWDNLYLYYTQFGRCMYSLDPIDLEELSNKNLYDQDHIYPKSKIYDDSIENRVLVKKQLNLDKSNEYPIPDRVLNKDKNKLLAFWKMLNEKELIGDKKYARLIRKSPFTDEELGDFIARQLVETRQATKETANMLKRLCPDSKIVYVKAKNVSDFRRKFDILKCRSINDLHHAHDAYLNIVVGNVFDTKFTSNPLNFIKNNSKNRSYNLEKIYDYDVIRNEKIAWLAERKEENQDGSIATVLKNLSKNDIRVTRRTYIKCEDLFDENIVRKGNGKFPIKENNNKSDTNKYGGYSGIKNAYFVLLEDEKHNRILEAIPSFIYKKEKNGEKGSVINYLQNILGIKSAKILRDKIKIGSLLKIDKFPYNLAGKSGNGILISGGVQLILDKNTSKYIKKIENYKYKLDENKDYQINIFDKLSKEENIKLFDLFVDKFENSIYKNRVNIKLKEIKLARPKFEHLSIEEQIKTLTQMLILFGRENNAVNLEYIGLPKNTGKTKINKKINNKDIKIINQSITGLYETEEDLANI

SEQ ID NO: 95 - protein, 1377 aa, Lactobacillus brevis
MESNHDGEQVKYTLGLDIGTSSIGYAAIDKHQKPIRAKGKHVIGVRLFQEGQTAADRRAFRTTRRRLKRRKWRLNLLNRLFDPYLSEVDPNFLPRLRQSNLSPKDDNKHFNGSTLFPDKTDAAFYRQYPTMYHLRYALMTEKRKFDIREVYLAIHHIVKYRGNFLNSATVDSFKTSNIDFTSQFDRLNELYRQVILDEPFQINMDQVDEMTNKLLDNDALKLDTQKQVAKLLPVIYNDKPIDKQYTRIATEFSKAILGYKTKLDVILNLDTQNAKDWVIRLDDEDIDDKLPALVENLDESRQEIVTIIRDLYAQITLNAIVPKGKSLSESMVDKYNDHKDHLDLLMGLIHELGDDSAKGIKLREAYTQYVGKSDDKTLNQDDFYAAIKKNLDEDSKRSPKIQRLIEQASFMPKQRTSANGVIPHQLHQLELDRIIENQGRYYPFLKKPNPNTHKPNGGKYKLDELVAFRIPYYVGPLITKRDQEKTSGADFAWMIRKPGQEGEITPWNFDQKVDRMASANRFIRRMTTKDSYLVAEDVLPDASLIYEKFKALNELNMLKVNDSRLSPSQKQDLFNNLFKKQKTIRTKKLQTYIRTNWELPSVMISGLADPDKFNSSLSTYIDFRDIFGEKVDDPNRQADYEEIIEWSTVFEDRKIYQAKLNQLDWLTEPQRKALLTKRYTGWGRLSKKLLTGLKDQNGDSILDQLWKTNDNFMQIQSRDEFAKQIHDENAKQFHEANNVDDILDDAFTSPQNKKAIRQVDKVVQDVVKAVGYAPDKIAIEFTRSLENNPQRTVSRQRQLQAAYKNIPREIMKSGLMAELGSVADSKKVLSDKLYLYFTQMGKDMYEDKTINIDNLPNYDIDHILPQAFIKDDSIDNRVLISKEENARKSNRVPLKFFGAKRMGFWKDLLNNGLISNRKFQNLTTDPEKISKYSAKGFIHRQLVETSQVIRLVANILGNEYSQAGTTIIEVSAKMNRQLREDFHLIKNRNVNDYHHAMDAYLTAYVGDYLYLRYPKLRPYFVYGDFKKAEDQDLNIRNFNFLHDLKDNESLDKIVDSETGEIVWEKHGSVKQLKKVYHYKFMLVSQEVYTRQDALFNQTIYPASDADKRKLIPIKNSKPVDVYGGYSGNIDAYMAIVRVHGKKEDNYKVVGIPMRAVTKLKKAEKEGHDSYLNAVHEVLKPQFTKKKKNRKTGEITETVDEFDVLLGKVYYRQLIVDGNKKFMLGSSSYQYNAKQLVLSDKAMQVLSKNGKVKSQDENQNLIDVYDEILEKVDQYFELYDQRHYRESLHKGRGIFVNLPLSNQYDGSKLTSYGKYETIDAILNGLHANATMSNLRYLGISSPFGKMQASNGLTIDPDSIICYQSPTGLFERQIKLSDL

SEQ ID NO: 96 - protein, 1239 aa, Lactobacillus buchneri
MTEKRKFDIREVYLAIHHIVKYRGNFLNSATVDSFKTSNIDFTSQFDRLNELYRQVILEEPFQINMNQVDKMTNKLLDNDALKLDTQKQVAKLLPVIYNDKPVDKQYTRLATEFSKAILGYKTKLDVILNLDTQNAKDWAIRLDDEDIDDKLPALVENLDESRQEIVTIIRDLYAQITLNAIVPKGKSLSESMVDKYNDHKDHLDLLMGLIHELGDDSAKGIKLREAYTQYVGKSGDKTLNQDDFYAAIKKNLDEDSKRSPKIQRLIEQASFMPKQRTSANGVIPHQLHQLELDRIIENQGRYYPFLKEPNSNTHKPNGGKYKLDELVAFRIPYYVGPLITKQDQEKTSGADFAWMIRKPGQGGEITPWNFDQEVDRMASANTFIRRMTTKDSYLVAEDVLPDSSLIYEKFKVLNELNMLKVNDRRLSISQKQDLFNNLFKKQKTIRTKKLQTYIRTKWELPSVMISGLSDPDKFNSSLATYIDFRDVFGEKVDDPNRQADYEKIIEWSTVFEDRKIYQAKLNQLDWLTESQSKALLTKHYTGWGRLSKKLLTGLKDQNGDSILDQLWKTNDNFMQIQSRDEFAKQIHDENAKQFHEANNVDDILDDAFTSPQNKKAIRQVDKVVQDVVKAVGYAPDKIAIEFTRSPQDRPQRTFSRQRQLQSTYLNVAKALMKSNLNQELKSVIDSQQTLTDKLYLYFTQLGQDMYTGKEINFDELVNYQIDHILPQAFIKDDSLDNRVLVSAPINNAKSDNVPVKKFGAKMGYFWKQLAENHLISKRKLNNLTTDPDKIGKFTAQGFIHRQLVETSQVIRLVANILGNEYGHDGTTIIEVTAKMNHQMRKDFDLIKIRDVNDYHHAMDAYLTAYVGDYLYLRYPKLRSYFVYGDFKKLKDQSLKIRNFNFLHDLTNDEAGDKIVDQETGEIIWDKHESVKQLKKVYHYKFMLVSQEVYTRQDALFNQTIYPASDADKRKLIPIKNNKPVDVYGGYSGNVDAYMAIVRIHGKKEDKYKVVGVPMRAVADLKKAESKGRDNYLNAVHEVLKPQFTKKKKDRKTGEITEMMDDFDVLLGKVYYRQLIVDGNKKFMLGSSTYQYNAKQLVLSDKAMQVLSKDDKLKNQDENQNLIDVYDEILEKVDQYFELYDINKFRQKLHDGRKKFIELPVDNDFNGKKLISYGKRATIISILNGLHANATMSNLKYLGISSPFGMLQVPNGIILSPASRICYQSPTGLFERKVKLSDL

SEQ ID NO: 97 - protein, 1381 aa, Lactobacillus fermentum
MDYVKEYHIGLDIGTSSIGWAVTDSQFKLMRIKGKTAIGVRLFEEGKTAAERRTFRTTRRRLKRRKWRLHYLDKIFAPHLQEVDENFLRRLKQSNIHPEDPAKNQAFIGKLLFPDLLKKNERGYPTLIKMRDELPVEQRAHYPVTNIYKLREAMINEDRQFDLREVYLAVHHIVKYRGHFLNNASVDKFKVGRIDFDKSFNVLNEAYEELQNGEGSFTIEPSKVEKIGQLLLDTKMRKLDRQKAVAKLLEVKVADKEETKRNKQIATAMSKLVLGYKADFATVAMANGNEWKIDLSSETSEDEIEKFREELSDAQNDILTEITSLFSQIMLNAIVPNGMSISESMMDRYWTHERQLAEVKEYLATQPASARKEFDQVYNKYIGQVPKEKGFDLEKGLKKILSKKENWKEIDELLKAGDFLPKQRTSANGVIPHQMHQQELDRIIEKQAKYYPWLATENPATGERDRHQAKYELDQLVSFRIPYYVGPLVTPEVQKATSGAKFAWAKRKEDGEITPWNLWDKIDRAESAEAFIKRMTVKDTYLLNEDVLPANSLLYQKYNVLNELNNVRVNGRRLSVGIKQDIYTELFKKKKTVKAGDVASLVMAKTRGVNKPSVEGLSDPKKFNSNLATYLDLKSIMGDKVDDNRYQMDLENIIEWRSVFEDGEIFADKLTEVEWLTDEQRSALVKKRYKGWGRLSKKLLTGIVDENGQRIIDLMWNTDQNFMQIVNQPVFKEQIDQLNQKAITNDGMTLRERVESVLDDAYTSPQNKKAIWQVVRVVEDIVKAVGNAPKSISIEFARNEGNKGEITRSRRTQLQKLFEDQAHELVKDTSLTEELEKAPDLSDRYYFYFTQGGKDMYTGDPINFDEISTKYDIDHILPQSFVKDDSLDNRVLVSRAENNKKSDRVPAKLYAAKMKPYWNQLLKQGLITQRKFENLTMDVDQNIKYRSLGFVKRQLVETRQVIKLTANILGSMYQEAGTDIIETRAGLTKQLREEFDLPKVREVNDYHHAVDAYLTTFAGQYLNRRYPKLRSFFVYGEYMKFKHGSDLKLRNFNFFHELMEGDKSQGKVVDQQTGELITTRDEVAKSFDRLLNMKYMLVSKEVHDRSDQLYGATIVTAKESGKLTSPIEIKKNRPVDLYGAYTNGTSAFMTIIKFTGNKPKYKVIGVPTTSAVGLKRVGKPGSESYNQELHRIIKSNPKVKKDFEIVVPHVSYSQLIVDGDCKFTLASDTYQHPATQLVLSKESMEIIADDFKFVKENPATADEQLVRVFDEIVNQMNHYFTIFDQRSNRQKVTKARDKFVSLPTESEYEGAKKTQVGKTEVITNLLMGLHANAAQGDLKVLGLSTFGFFQSSGGLNLSEDAMIVYQSPTGLFERRICLKDI

SEQ ID NO: 98 - protein, 1306 aa, Sphingobacterium spiritivorum
MKHILGLDLGTNSIGWALIKQNFENKQGEILGMGSRIIPMGAELSKFEQGQAQTKNANRRIARGTRKLNKRYKQRRNKLIYILQGLGMLPDQIKLVNQFSDPNKLDKISILPISKNQQQLTAFDLLELRVKALTEKIELEELGKVIYKYNQLRGYSGGNSEPEKEENNEDESEENEKTNDSFVVFSKVLSLGLPEEITFKGKKLSKRKIAIETEDGIIEAETFLDSLKENDSLELHVNIRRAKSGDTITIKLPSKTSWRKKMENIEKQLADKSKELGREYFISELLFDILKENKWAKIRNNVILRSRYESEFDAVWSEQSKYYPILNHLETDRLQKILEFIFPGQKESQEKLRQTGLKEGLKYVIKNQVVFYQRELKDQSDLISNCRYEPTEKVVAKSHPVFQEYKIWEQINKLVINTKIENGVNRKGEIRYKYIDKPIPVALKEWLYEELQSKKEVSFNPILTKLKKEFKLRENVDFLNGMNAKDKLKGNETKVILQKALGELWNIFGLDDSERQVELWEILYNGKGNEYDLTSERTSNILAFIEKYSPDLENKNDVAIKISKIKFSRNYSNLSLKAIDNILPLVRAGKFFDQNFSEALSHKIVKLLNENVEDPFEKSAQEFLDKNQDVLSDGGIVNAIATILVYDKHTAKEYSGDELIKEFTQISRLKQGELRNPLAEQIINEALVIVRDIWRKYGFKPDEIRVELARELKNNAVERGKMYSANLKSQKHNAEIRNKLIELKQEISIANIEKYKLWVSQENLQEVYLKNYNDPSKSEIEKLKLWESQGHISPYTGQPISLSELFNRERYDVDHIIPQSRYFDDSLSNKVICEKSINNEKGNRTSMEYFEVGSVNYRIFTKDQFIDHANKYFSGKKRKNLLATSIPEDPIQRQIKDTQYISIRIREELNKIVGNENVKTTTGGITDYLRNHWGLTDKFKVLLKERYEAVLPKIAQLEYDNYKKETEKKFTEYKNADVEFNEPILDEEIFIEKFRSEFIRKKNNKLIIKGWSKRIDHRHHAMDALVIACTQPAHIKRLNDLNQVLKEWLDKNKEKFFPGFSGTKTELLDEVLNLEEEKRREIFNQLEKFRAIEMPWKGFPEEAEQKLKEVIVSHKPKDKLLLQYDIQGNKQIKLRGQLHEGTLYGLSNGKEIYRIPINKLAGKQFATEKTIEKIVNPFLKNVIEEHLKSFGKKEEAFSAEGILDLNKKLAERKDEQQNPKPHPPISTIKIYYKDPSKSKKKKTDDEDDISLQKLNRKKSFNDSLYVKTGDNYLFAVMEKEVFNKKLNKDKTERHYDLKLFLTLLIF

SEQ ID NO: 99 - protein, 1358 aa, Unknown
  Acidaminococcus sp.
MGKMYYLGLDIGTNSVGYAVTDPSYHLLKFKGEPMWGAHVFAAGNQSAERRSFRTSRRRLDRRQQRVKLVQEIFAPVISPIDPRFFIRLHESALWRDDVAETDKHIFFNDPTYTDKEYYSDYPTIHHLIVDLMESSEKHDPRLVYLAVAWLVAHRGHFLNEVDKDNIGDVLSFDAFYPEFLAFLSDNGVSPWVCESKALQATLLSRNSVNDKYKALKSLIFGSQKPEDNFDANISEDGLIQLLAGKKVKVNKLFPQESNDASFTLNDKEDAIEEILGTLTPDECEWIAHIRRLFDWAIMKHALKDGRTISESKVKLYEQHHHDLTQLKYFVKTYLAKEYDDIFRNVDSETTKNYVAYSYHVKEVKGTLPKNKATQEEFCKYVLGKVKNIECSEADKVDFDEMIQRLTDNSFMPKQVSGENRVIPYQLYYYELKTILNKAASYLPFLTQCGKDAISNQDKLLSIMTFRIPYFVGPLRKDNSEHAWLERKAGKIYPWNFNDKVDLDKSEEAFIRRMTNTCTYYPGEDVLPLDSLIYEKFMILNEINNIRIDGYPISVDVKQQVFGLFEKKRRVTVKDIQNLLLSLGALDKHGKLTGIDTTIHSNYNTYHHFKSLMERGVLTRDDVERIVERMTYSDDTKRVRLWLNNNYGTLTADDVKHISRLRKHDFGRLSKMFLTGLKGVHKETGERASILDFMWNTNDNLMQLLSECYTFSDEITKLQEAYYAKAQLSLNDFLDSMYISNAVKRPIYRTLAVVNDIRKACGTAPKRIFIEMARDGESKKKRSVTRREQIKNLYRSIRKDFQQEVDFLEKILENKSDGQLQSDALYLYFAQLGRDMYTGDPIKLEHIKDQSFYNIDHIYPQSMVKDDSLDNKVLVQSEINGEKSSRYPLDAAIRNKMKPLWDAYYNHGLISLKKYQRLTRSTPFTDDEKWDFINRQLVETRQSTKALAILLKRKFPDTEIVYSKAGLSSDFRHEFGLVKSRNINDLHHAKDAFLAIVTGNVYHERFNRRWFMVNQPYSVKTKTLFTHSIKNGNFVAWNGEEDLGRIVKMLKQNKNTIHFTRFSFDRKEGLFDIQPLKASTGLVPRKAGLDVVKYGGYDKSTAAYYLLVRFTLEDKKTQHKLMMIPVEGLYKARIDHDKEFLTDYAQTTISEILQKDKQKVINIMFPMGTRHIKLNSMISIDGFYLSIGGKSSKGKSVLCHAMVPLIVPHKIECYIKAMESFARKFKENNKLRIVEKFDKITVEDNLNLYELFLQKLQHNPYNKFFSTQFDVLTNGRSTFTKLSPEEQVQTLLNILSIFKTCRSSGCDLKSINGSAQAARIMISADLTGLSKKYSDIRLVEQSASGLFVSKSQNLLEYL

SEQ ID NO: 100 - protein, 653 aa, Unknown
  Oribacterium sinus
MELINSEEFTFKEELEKHTQVAMKQLSEFTYEDLEDSYFSVPVKRMIWQTLLVVREIEKVMGYAPKRIFVEMTRTEEEKGDKGRKESRGNQLLELYKSIKNTDSHNWKEEIAAADKDGKLRSKKLFLYYMQMGRDMYTGEEIDLGRLYDDNLYDIDHIYPRHYVKDDSIMNNLVLVNRRANQDIKKDLYPIPEQIKANPNVHMLWDALHKQKLITDEKYARLTSNTAFSEKQLGDFIARQLVETGQGTKGVADLLEQLFKDTVIVYAKASNVSDFRRDNGFLKSRLVNDFHHAQDAYLNIVVGNVYYTKFTKNPWNFICKDYEKDKEKNRYNLARMFDWNVVRGSETAWIVERKDEKGTISTVRKMMQKNTPLLTRMNFEQHGSIANATLYSAKKAKSENYLPLKTADEKMSDVKKYGGYTSMSIAYYFIVHHKEDKKENVTIEALPLYCKDKVEREENGLEKYCEEVLGYGEVNIIRRKLKIQSLLEFNGYQVHLSGKTGNQLILRNAISLCLSTKWITYIKKLEKAVNIQIVEEVVTPEENIKLYNLLADKHANTVYSKRPNAYGEKLLADREIFVTLEFGKQCEALLQILSLTKIGSTEANLLLIGESEHSGKILISKNLKASDRPAVINQSPCGLYEKKEWIFDKIVEK

SEQ ID NO: 101 - protein, 1436 aa, Capnocytophaga gingivalis
MKYIKYILGLDIGSNSIGWALIQLDLLQKTKRIIAAGSRIIPMDQKVLSDFGKGITISPTAQRTSYRNARHCRERHLLRRERLHRVLHILGFLPTHYDKQIDFSKRYGKFVDNTEPKIAYNEGKFLFMDSFQEMLSDFKSHQPDLFYTKKNGEESKIPYDWTIYYLRKKALSQKISKEELAWIILNFNQKRGYYQLREEEGNKENDFEIISSKIISVIKKDKDKKYNKYWYDIILENGLVYQAAFYNDFVYNWINQDREFIIERTSLKNGAEKVKLSYLPTFDEIDKMDKKEQDKYYKKIKIKTENSIGNKTVGCYIYDHILQNPNEKIKGKLVRTIERKYYKEELKAILEKQIALQPELFTDQLLADCIRELYSKNEAQQRNLAARDFVHLLVEDIIFYQRPLRRQKSTLANCSLESRSYIDKDSHTRKEAPLKVCPKSNPYYQEFRVLQWLQNLKIYEIDSDQEVTHQFIKTLEDKQQLFEFLMAQKEIDCEELLKYFLNQTYPNAKEKALKSELKKWKDTYRWNYVYDIGEKSSKKYPMNETRYELKRHLEKVANLPDDFLSSEVEYLLWHLIYSVKDKVAYEKGLKKFAQKHHLDKDSFVESFKKFNPYPSEYGSFSEKAIRKLLPLMRFGAHWDFNHIDKNTQKRIEDLITGVENEEIRTILREKAEKYQLEKETDFQDLPLWLAQYIVYNRHAEASSLEKWTSVNDLETYLNEFKQHSLRNPIVEQVVMETLRVVRDIWQQYGQGQASFFNEIHIELGRELKKTAKEREKLSKQNQKNEDINLSIKEKLKELEKYNTRAYSITHQEKYKLWLEQKHISPYTGQIISPENLFTDNYEIEHIIPQSRFFDDSLSNKVVCESIVNKAPYKDRQLGLEFIKNQGGRIVKELSKENKTIKIFTEEQYRTFIKEHYSNNPEKTKKLLLEEIPEKMVARQMNDTCYISKFISEILSKIVRSDEQDEGVHSKNVILCTGKITSILRQDWGLNDIWDNLILPRFERMNNLLQKEKFTIYSIEKQKKIPVVPINDQFKSFQKKRIDHRHHAMDAIIIACTTREHINYINNQHALEKEKDKKEKQEERDKLREKLCIKKYNNRSEGNYSWIFKKPWDTFTQEVRVALEDIVVSFKQNLRVINKATNYYERWVEENGKYIKKMVKQEGTNWAIRKPLHEETISGKIYLDREKITKNDILTATRKTVDSSFDDKRIKKITDTGIQKILLNYLKYKGSPEIAFSPEGLEELNKNLSIYNDGKPHKPIYKVRIYEKGSGRFALGEKGRKYKKYVQGASNLYFGIYQGAKRSFATIPLNEVIERQKQGLPSVPEYNEKGDLLLFSLSPNDLVYVPIEGEIIENIDFRNLSKEQKERIYNVNDFSSTCYFTPNRIAKAIFPKEVDLQRKGDKLSGSYDTKTASLEGIQIKEVCIKLKVDRLGNISKA

SEQ ID NO: 102 - protein, 1069 aa, Bacillus cereus
MNYDIGLRIGITSCGWSIINKDLERIEDLGVRVFEKAENPDGTASAAPRREARKSRRKHRRKKHRIERIKRLIVQHDLLSKKELDSLYLSPFNIDVWNLQVEALERKLDNREFARVLIHLVQRRGFQTIRKSVEIQEEGKLLENVSENERIMKVNGYKTVGEMFSKHEKFTHHKRNKDGSYTSVVTRSLLLKEIKTIFNSQRILGNVFSTQKLESDYLYIWGSQRPTLTYEQLMSMVGNCIYEKKEKRAPKTSWAFQYFSLLQKINKLKVSDDNTLRKLSKEERDIVIELAFKKKNVSFVDIRKALKLNDNTKFNHLTYSHVVETKKVEKATFIELKGYHLIKKQLKDRNVELTQELQPKDYDAIAAASTFFKNDIEFRDYLRNQYLDSNGKRKSNIANKVFEDKVIAAVFELNFSKVCHLSFKSLYKLIPHLEKGLDYKEAILCAGYNFRDENKRDKKLFLPVIQQETNPVVHRALTQARKVINAIIREYGSPNTIRFVVANDLAKTYKQRKELESTLKKNRAENEKIKTKLLSMGIINPTGMDIVKYKLWYEQSGICLYTGRQMELSSLFKPGYSIVNHIIPYNRSFDDTYHNRVLTLTETKYEKGNKIPFEYFGAEETCWNEYEKRVSTSKKIHDKKREKLLIRNFDIEYENEMISNNVFDTHYIGSYFEKYIDEHLQFKKSTKKQKVFSIHGNMVAHLHSRWGFNKNSREIYLNHAVDAAIVAVLTDQLIRNIADYYRRDNILEQKGSLKFPEPWKSFSIELEARISPQVRDLIKKLNLDSYLDVDILHIKPVFISKKPRRKVNGEAHKSTIRSLIGINEIGKTVTCIKTRLEDIPFDENGDFPMYGKDTDKYTYTAIKERYLEFNKDKEKAFSTPLYKLKRNGEPGNQIKSVKIIDTRNIVNKVNQGKGIAYNSNIIRVDVFSRDQKYYVVPIYLRDFIKGSLPNKIITAAKGFMQWPETDNSYTFLFSIFPNDLIKVVPKEGKFIKAKNENKENINLTEILGYFKGLDSSTGAFTLESHDGSLLARGIGTKNLLLIEKYQVDVLGRYNKVGNEERQDIKIQQN

SEQ ID NO: 103 - protein, 1391 aa, Unknown
  Lactobacillus jensenii
MKEIKDYIIGLDIGTNSCGYVVTDKQNNILKLKGKTAIGARLFKEGEAAADRRAFRTTRRRLARRRWRLSLLEEIFDEEMNKVDPSFFRRLKESDYSPKDRRKQFNSIVFESSEADKAFYEKYPTIYHLRNALMHDNQKHDLREIFLAVHHIVKYRGNFLREDSVKAFKAAKFTLQGEDGIGPVDKLNDLLKEIYIEAAPELATDNLSKIEDIIKDKKLYKQDKLKQIANLLPKAVDSKDKAKLNKDIAKQVANALMGYMFRLDTLFSFTDVDVKDYKLKFSDANIDESLDALTSLLTDAQIEFVLELQSIYNTIVLNEIVPDGMSLSESMVKKYDDHKKDLKLYKEYIDSLSDQKKAKQLEAAYALYVNYRKADLLAAKKLFEKKKIGDKKFVDVISNFEVFGKFVSDNLDDSELANKIKARLDLGEFLPKQRTNQNGVIPYQLHQVELTQILEKQGKYYPFLITPNPVESHRNNAPYEISELVSFRVPYYVGPLIDNQSIKDKQNKNKFAWMVRQKQGQITPWNFEEMVDTTESANQFIKRMTRKDTYLLAEDVLPKSSLIYQKFMILDELNRIKIDGKKLTSKLKHDIFEKLFKKQKSINLDNLKNYLLAEGNIPGLIEGLSDGINFNNSFSTYIDYRNIFGDEIDNPNKQADFEKMIEWSTVFEDRKIFKRKLKEITWLTPEQIKQVSSKRYSGWGRLSKKLLTQITDENGVNILQRLWNEPETLTEVLANPVIKRKISEANSLFVQINKVENILDDAYTSPQNKKAIRQVIRVVDDIIAAAHGKKPSQIAIEFARSSQNKAKVPDTRKKQLDKIYNKISSEILDSSIKNELKNLKSNKYLSKDKLFLYFKQMGRDAYTGDKLSLDQLQNYDIDHIFPRSFIKDDSLDNRVLTQKPINAKKSDYGIPALEFGNKYVPDLGITVKEMWKLWQENGLISKSKLINLCTNPKKIGSKRASGFINRQLVETSQVIKLVAIILQAEFPDTEIIEVKALQNTTLRESFHLYKNRSVNDYHHAIDAYLTTIVGNYLYQVYPKLRPYFVYGQFKKFNQEKNIDILKRLKNFNFLRQLIFNTDDNIYISGTKEIVFNKKDIIHKLETAYGYKYMNISRECYQETSSLFNQTLYAHNSSVKNSLIPKKKGLPTEIYGGYSGNKDSFFVLVKIVKKRTNLYRIVGIPTRELAKLNSSNNYNQALNKIVESKLCLKETESFKILIKRLLYGTLIVDNGQKFRIGSFKEKHNVQQLVLQLKSMKYIKFYIDGGQNYFTDVERKKLEKQDRDKCLLYVFDDIMNVVNKRFTLFDMSKYEKDGDSLREKFNCLDFNDKVSILSDLLKAFHANSDRTSITKLKITNLGRHQAGKNGITLTTNAQIIYQSPTGLFERRIKIKDL

SEQ ID NO: 104 - protein, 1114 aa, Eubacterium rectale
MNYTEKEKLFMKYILALDIGIASVGWAILDKESETVIEAGSNIFPEASAADNQLRRDMRGAKRNNRRLKTRINDFIKLWENNNLSIPQFKSTEIVGLKVRAITEEITLDELYLILYSYLKHRGISYLEDALDDTVSGSSAYANGLKLNAKELETHYPCEIQQERLNTIGKYRGQSQIINENGEVLDLSNVFTIGAYRKEIQRVFEIQKKYHPELTDEFCDGYMLIFNRKRKYYEGPGNEKSRTDYGRFTTKLDANGNYITEDNIFEKLIGKCSVYPDELRAAAASYTAQEYNVLNDLNNLTINGRKLEENEKHEIVERIKSSNTINMRKIISDCMGENIDDFAGARIDKSGKEIFHKFEVYNKMRKALLEIGIDISNYSREELDEIGYIMTINTDKEAMMEAFQKSWIDLSDDVKQCLINMRKTNGALFNKWQSFSLKIMNELIPEMYAQPKEQMTLLTEMGVTKGTQEEFAGLKYIPVDVVSEDIFNPVVRRSVRISFKILNAVLKKYKALDTIVIEMPRDRNSEEQKKRINDSQKLNEKEMEYIEKKLAVTYGIKLSPSDFSSQKQLSLKLKLWNEQDGICLYSGKTIDPNDIINNPQLFEIDHIIPRSISFDDARSNKVLVYRSENQKKGNQTPYYYLTHSHSEWSFEQYKATVMNLSKKKEYAISRKKIQNLLYSEDITKMDVLKGFINRNINDTSYASRLVLNTIQNFFMANEADTKVKVIKGSYTHQMRCNLKLDKNRDESYSHHAVDAMLIGYSELGYEAYHKLQGEFIDFETGEILRKDMWDENMSDEVYADYLYGKKWANIRNEVVKAEKNVKYWHYVMRKSNRGLCNQTIRGTREYDGKQYKINKLDIRTKEGIKVFAKLAFSKKDSDRERLLVYLNDRRTFDDLCKIYEDYSDAANPFVQYEKETGDIIRKYSKKHNGPRIDKLKYKDGEVGACIDISHKYGFEKGSKKVILESLVPYRMDVYYKEENHSYYLVGVKQSDIKFEKGRNVIDEEAYARILVNEKMIQPGQSRADLENLGFKFKLSFYKNDIIEYEKDGKIYTERLVSRTMPKQRNYIETKPIDKAKFEKQNLVGLGKTKFIKKYRYDILGNKYSCSEEKFTSFC

SEQ ID NO: 105 - protein, 1362 aa, Lactobacillus paracasei
MTKLGKPYGIGVDIGSNSIGFAAVDENSHLIRLKGKTVIGARLFEEGKAAAKRRAGRTTRRRLSRNRWRLSFLRDFFESHITPTDPNFFMRQKYSEISPKDKARYKYEKRLFNDRTDAEFYQQYSTMYHLRNRLMTDPSRADVREIYFAIHHILKSRGHFLTPGDAKDFNTNDVALDEIFPALQDAYAQVYPDLGITFDEDKANEFKTILLNEIATSIDTQRALVKLLLAEEDDKDILKQQKQVLTEFAKAVVGLKTKLNLALGTEVDSSEATAWNFSLGQLDDKWAGIESAMTDEGTEILDQIRDLYRARLLNGIVPTGKTLSQAKVDDYTQHHEDLQLFKAYLKQLEDDGTAKAIRQLYDRYIDGDDAAPFLRENFVKALTKDVTAHPNTKSPELLERLAQPDFMLKQRNKANGAIPVQMQQRELDQIIKNQAVYYDWLAAPNPVEKHRKSMPYQLDELLNFRIPYYVGPLVTAKEQKAAQGGVFAWMVRKDPEGNITPYNFDEKVDREASANTFIQRMKTTDTYLIGEDVLPKQSLLYQRYEVLNELNNVRVNNEKLSIEQKQQVIRELFERHNSVTIKQFAENLRAHGDYAHIPEIRGLADEKRFLSSLSTYRQLKSLLPEAIDDPAKQADIENIIAWSTVFEDAAIFKTKLKEISWLGSEAITKLSNIRYRGWGQFSRKFLNGLTLGNGHTIIQELLLSTNNLMQILTDETLQKKMTELNADKLKTANINDAIDNAYTSPSNKKALRQVLRVVDDIKRAADGQDPSWLYVETADGGGTPGKRTRARQHQLQEIYANAAHELIDTAVRGELEDKISDKADFNDRLVLYFMQGGRDIYTGAPLNIDQLSSYDIDHILPQSLIKDNSLDNRVLVHAIINREKNATFASTIYAQKMNATWRQWHEAGLISGRKLRNLQMRPDQIDKYASGFVARQLVETRQIIKLTEQIVAAQYPDTKIIAVKAGLSHQLREELEFPKNRDVNHYHHAFDAFLAARIGTYLLKRFPNLQAFFTYGKFTKADVKKLRGFNFIRDITHAEDKIVAKDTGEVVWDKQRDVDELDRIYNFKRMLITHEVRFETADLFKQTVYGARDSKEAGGSKQLIPKKKGYPVDIYGGYFRENTAYLAVVKVTKKTETIFKVVKIATSQVAALNKARSRSTAEELSVLTELLKPKFSKVGKNGKITDTPFEVVLPRVPREQLFYNAKYGFFMVNSDTMFHNFQEIWVSRSDQKILQQIRKAKIDYPNVDQDLDNLFHNLADQIVKYFDLYSIAGFKEKISQSQNTFNDLAVDDTDQSVGKITVINELLKGAQANGMTGSLKVLKISTPFGFTQDKSGVLTKDSSIIYQSPTGLFERSVRLTDL

SEQ ID NO: 106 - protein, 1056 aa, Actinobacillus minor
MKALNYILGLDLGIASVGWAVVEIDQNELPIRLIDLGVRTFERAEVPKTGDSLALARRLARSSRRLVRRRAVRLLKAKRLLKQEGILQADDFHSSHLKPLPNNPWELRVKGLNHLLDRKEWAAVLLHLLKHRGYLSQRKNESKTDNKELGALLKGVSENRQLLQAQAFSTPAEIAIKKFQQEEGHIRNQRGAYSHTFDRNDLLAELRLLFQKQREFNNPYTSQSLEQAIAELLMWQKPALSGEAILKMLGKCTFEPSEYKAPKNSYSAEYFVWLTKLNNLRILENGADRGLTAEERQLLINQPFEKAKFTYAQARKLLELSDLAIFKGVRYGKDNAESATLMEMKAWHAIRKALESNGLKTEWNGLKTKPELLDKIGTAFSIYKTDEDISQYLNGELSPAVLNALLENLSFDKFIRLSLQSLAKILPLMEQGLRYDEACKQVYGDHYGKKEQLELRFLPKIPVEDIRNPVVLRTLSQARKVINGVVRLYGSPARIHIETGREVGKSFSERRDISKRQEENRNERQRAVEKFKEFFPHFVGEPKAKDILKMRLYEQQHGKCLYSGKELDLNRLLEKGYVEIDHALPFSRTWDDSFNNKVLVLASENQNKGNQTPYEWLNGKENAERWKLFQALVNGSRFPYSKKQRILTKYLDEDGFRERNLNDTRYVARFLCNFIEDNMQLVGQGKKRVFASNGQITALLRRSWGIQKVREDNDRHHAVDAVVVACSTRALQKKITDYVRYKEMNVFTGEKIDQETGEIIKFHFPEPWKFFRQEVEIRVFSETPAEDVVIALPDRPQANHEFIQPLFVSRAPTRKMTGQGHMETIKSAKRLAEGLSVSRVPLTQLKLKDLENMVNREREKALYEALKVRLEKFNNDPAKAFADPFYKKGGQQVKAVRVEQVQKSGVLVRQENGVADNASMVRVDVFIKGGKYFLVPIYTWQVAKGILPNRAATQGKEEEYWDIMDETAIFQFSLYQNDLIKLVTKKKTIFGYFNGLNRATSNINIKEHDLDKSKGKDGIYLEVGVKLALSLEKYQVDELGKNIQPCRSMKKRPPVR

SEQ ID NO: 107 - protein, 1081 aa, Neisseria flavescens
MTAFKPNPINYILGLDIGIASVGWAMVEIDEEENPIRLIDLGVRVFERAEVPKTGDSLAAARRLARSVRRLTRRRAHRLLRARRLLKREGVLQAADFDENGLIKSLPNTPWQLRAAALDRKLTPLEWSAVLLHLIKHRGYLSQRKNEGETADKELGALLKGVADNAHALQTGDFRTPAELAVNKFEKESGHIRNQRGDYSHTFSRKDLQAELVLLFEKQKEFGNPHISDGLKEGIETLLMAQRPALSGDAVQKMLGYCTFEPTEPKAAKNTYTAERFIWLTKLNNLRILEQGSERPLTDTERATLIDMPYKNKLTYAKARELLGLDDTAFFKGLRYGKDNAESATLMEMKAYHAIRRALEKEGLKDKKSPLSLSPELQDEIGTAFSLFKTDEDITGRLKGCLQPEILDALLKHINFDKFVQISLKALRRIVPLMEQGKRYDEACAETYGDHYGEKNSEEMLYLPPIPADEIRNPVVLRALSQARKVINGVVRRYGSPARIHIETAREVGKSFKDRKEIEKRQEENRKDREKAAAKFREYFPNFVGEPKSKDILKLRLYEQQHGKCLYSGKAIDIRRLNGKGYVEIDHALPFSRTWDDSFNNKVLVLGSENQNKGNRTPYEYLNGKDNSREWLEFKARVETSRFPHSKKQRVLLQKFDEKGFKERNLNDTRYVNRFLCQFVADHMQLTGKGKRRVFASNGQITNLLRGFWGLHKVRAENDRHHALDAVVVACSTVAMQQKITCFVRYKEMNAFDGKTVDKETGEVLHQKTHFPQPWEFFAQEVMIRVFGKPDGKPEFEEADTPEKLRALLAEKLSSRPEAVHEYVTPLFVSRAPNRKMSGAHKDTLRSAKRFVKHNEKISVKRVWLTEIKLADLENMVNYKNGREIELYEALKARLGAYGGNAKQAFDPKDNPFYKKGGQLVKAVRVEKTQESGVLLNKKNAYTIADNGDMVRVDVFCKVDKKGKNQYFIVPIYAWQVAENILPDIDCKGYRIDDSYTFCFSLHKYDLIAFQKDEKSKVEFAYYINCDSSNGRFYLAWHDKGSKEQQFRISTQNLVLMQKYQIDELGKEIRPCRLKKRPPVR

SEQ ID NO: 108 - protein, 1392 aa, Gemella haemolysans
MANKTWYLGLDIGSASVGWAATDTGYKIIRKNKKRLWGVRLFEEAKTAEDRRGYRSSRRRLARRKWRLNLLEELFTSEVKKVDENFFLRLKESQYHYEDKTHKVPYAIFNDKDYTDKDYYKDYPTIYHLRSKLMTEENPDIRKVFLAIHHIIKNRGHFLLQGQSFKDGNLNNLIKELLELDILHVGFEVTEEVVDKIADISLEKKTSKDKLNDIKELYPKEKQLLEVFRLIFGGKTSLDKLFAIDEYKELDAAIKSVSFKEKIYEEVRHDYEQVLSNYIELLDLAKLVYDSIILSDIKKEGKTLSESKVELFEKHRDDLLKLKNLVKNDSKLSEDKKVELYALIFKEDKDKGTNYVNYIRKSEEGKGCNYEDFKKFLVKELAKLEESSVKTEIIKDLELEQFLPLQRTKDNSVVPYQIHKEELVKILDNAARYHSFLNEKDESGYNVREKVIQLLEFRIPYYVGPLNSSKKAKEGGFAWSVRNTGYENTPVTPWNYSKVIDESASAEKFITNLTNKCTYLKGEDVLPKSSLLYSEFALLNELNALKYDGNRISLEARNTIIEKLFKQQGKKVTKTSIKNLLKAEGYIDGKGEITGIDITVKNDLKSYRDFKKILGNKFNSEHVENIILWITLYGESRKLIKAKIESVYGEVYSKDEITKMSRLVYKDWGRFSRKLLTELVSKKLYNEETGECLNIIGAMRQNNILFMELLADRFDYSKQIVEFNKELQEDVTEIAPEILDDLYVSPAVKRSIWQTVRIVEELKKIIGCAPAKIFVETTRSNQEKKKPTDSRKKQLELAYKAVKKDVKELEKEIGTINFDVLNDRLSSVEPSKLKAKKLYLYYTQLGRCMYSEEPINISELFDNNKYDIDHIYPQSKIKDDSFTNTVLVKRESNAAKTDRYPLGSDIQTPSNRRFWKFLKEKGLISDEKYNRLVRTEEFSDEELSGFIARQLVETSQSVKAVASILGELNPETSICYSKAENVSSFRQNFGKIKKGDRDSKNNDQLIKVREINDYHHAKDAYLNVVVGNVYDTKFTRNVFNFIKDKKDGRKYSLNKVFYENVSDSKTVAWEMDKTIHQVEKVMNNNNIMVTRRTSEQKGGLFDATVYKAKVAAKAKDGVYYPLKTSNSVVKDVAKYGGYTSIGIAYYSIFEYTIVNKKGEEKITRIIPIPIYISQNIKDSTALIEFGKSQIFCRAYEKIKDFKLLYRKLCIGSKININNYQYYIGGKSDERFYYDSAIQVTLDKKSEKYLKILSKYQNWKKENKDGELWENITKENNIELYNKLVEKMNSEIFTKKKSNKYNELNSEEIRNNFIKISVEEQAKVLLEILNLLTNKKSIFDLKSIDIKAARGKISFNLTSLIQFSIIEQSITGFYEKEITIIGDKGNDMENNNS

SEQ ID NO: 109 - protein, 702 aa, Helicobacter pullorum
MRKILKIDERIQFKEVDYTAKNPENKKFVEFKNLKKFCEILGAIVGDRALADSIARDMTLIKDEEELAQKLRGYGKFSQEQITQLSALHFSHHISLSLKALSEILPFMREGMRYDEACQEAKLQAKHNDKKSKFLPPFCESIYADELTNPVVHRAIAEYRKILNALIAKYGSVHKIHIELTRDVGKNFQEREKYKKEIESNYKARVQAMQECEKLGLTLSEGNILKLRLFREQNEICVYSGRKITLANLKEQGALEIDHILPYSRSSDDSYMNKVLVFTNENQNKGNKTPYEAFGGDSQKWGEIESLALRSGYPKKKAKRILDKGFGDREAGFKSRNIVDSGYIARLIANYTKEYLKFLPLDSHENTALIAGEKDSKIHVEAVKGMLTATMRHFWGLGSKNRYEHTHHAVDAIIIAYINAAMIQRFSQFRQNQESLKARFYAKELAKEEFKTQRAFFEPFSGFREQVLAKVGQIFVSRPPRKRARGALHEETFYSIDDKKLSETYGGKKGVQRALSLGKIRQIGTKIVANGPMVRVDIFKHTQSGRFYAVPIYTMDFALGILPNKAVVSGKDKDRIIKDWLEMDSCYEFCFSLFKDDVIEVQKRDMEKPELAYFVSLDASDGRIKVRHHCNDITKINENQKKLFSEAIEKEVVGRGSIQNLKVFKKYKVSPLGEIKEAKYEPRQPIALKTSPKKHRKQNNAQ

SEQ ID NO: 110 - protein, 1371 aa, Streptococcus dysgalactiae
MDKKYSIGLDIGTNSVGWAVITDDYKVPSKKFKVLGNTDRHSIKKNLIGALLFDSGETAEATRLKRTARRRYTRRKNRIRYLQEIFSSEMSKVDDSFFHRLEESFLVEEDKKHERHPIFGNIVDEVAYHEKYPTIYHLRKKLADSTDKADLRLIYLALAHMIKFRGHFLIEGDLNPDNSDMDKLFIQLVQTYNQLFEENPINASRVDAKAILSARLSKSRRLENLIAQLPGEKRNGLFGNLIALSLGLTPNFKSNFDLAEDAKLQLSKDTYDDDLDNLLAQIGDQYADLFLAAKNLSDAILLSDILRVNSEITKAPLSASMIKRYDEHHQDLTLLKALVRQQLPEKYKEIFFDQSKNGYAGYIDGGASQEEFYKFIKPILEKMDGTEELLAKLNREDLLRKQRTFDNGSIPHQIHLGELHAILRRQEDFYPFLKDNREKIEKILTFRIPYYVGPLARGNSRFAWMTRKSEETITPWNFEEVVDKGASAQSFIERMTNFDKNLPNEKVLPKHSLLYEYFTVYNELTKVKYVTEGMRKPEFLSGKQKEAIVDLLFKTNRKVTVKQLKEDYFKKIECFDSVEISGVEDRFNASLGTYHDLLKIIKDKDFLDNEENEDILEDIVLTLTLFEDKEMIEERLKKYANLFDDKVMKQLKRRHYTGWGRLSRKLINGIRDKQSGKTILDFLKSDGFANRNFMQLINDDSLTFKEAIQKAQVSGQGHSLHEQIANLAGSPAIKKGILQSVKVVDELVKVMGHKPENIVIEMARENQTTQKGQKNSRERMKRIEEGIKELGSQILKEHPVENTQLQNEKLYLYYLQNGRDMYVDQELDINRLSDYDVDHIVPQSFIKDDSIDNKILTRSDKNRGKSDNVPSEEVVKKMKNYWRQLLNAKLITQRKFDNLTKAERGGLSELDKAGFIKRQLVETRQITKHVAQILDSRMNTKYDENDKLIREVKVITLKSKLVSDFRKDFQFYKVREINNYHHAHDAYLNAVVGTALIKKYTKLESEFVYGDYKVYDVRKMIAKSEQEIGKATAKRFFYSNIMNFFKTEITLANGEIRKRPLIETNEETGEIVWDKGRDFATVRKVLSMPQVNIVKKTEVQTGALTNESIYARGSFDKLISRKHRFESSKYGGFGSPTVTYSVLVVAKSKVQDGKVKKIKTGKELIGMTLLDKLVFEKNPLKFIEDKGYGNVQIDKCIKLPKYSLFEFENGTRRMLASVMANNNSRGDLQKANEMFLPAKLVTLLYHAHKIESSKELEHEAYILDHYNDLYQLLSYIERFASLYVDVEKNISKVKELFSNIESYSISEICSSVINLLTLTASGAPADFKFLGTTIPRKRYGSPQSILSSTLIHQSITGLYETRIDLSQLGGD

SEQ ID NO: 111 - protein, 1007 aa, Unknown
  Helicobacter canadensis
MKVLGFDIGINSIGWAFVENNELKDCGVRLFTKAENPKTKESLALPRRNARSSRVRLRRRRSRLLSLKHIISKEFGLHYEDYIALDGNLPKAYTGKIESIYKLRYEALSQAISKEDLARVILHIAKHRGYMNKNQKTSQDSEKGAILSAIKENSNKIKHYQTAGEYFYKELFENLRDGTKEFKNIRNKAMKNEKTGNMESTYYNTILASDLEKELKLILEKQQAYHNYSDTFIKEVLEIAFYQRPLKDFSHLVGSCTFYENEKRACKNSYSAWEFIALGKIINTLESIKKDTGEIFSNEIITQILKEVLDKGSLSYTKLRKMINLDEKVKFKGLKYDKEGVEKTNLIEFKKLKEFKKALGEHNLERKTLDEIATHITLTKDENQLKKQLEQYALSQNQIDALAELDFNDHINLSFKALYEILPLMEKGKRYDEACNELGLKAKTSNQKSEFLPAFCDSIFAQELTNPIVNRAISEYRKVLNRLLKKYGKMHKIHIELARDAGLSKEARNKIEKEQKENKDINDKAEKTCKEFGLKPNAKNILKIKLWREQGEICAYSGKKITIDDLKEDKALEVDHIYPYSRSYDDSYNNKVLVFIKENQLKLNQTPYEAFGSNQEKWSKIQVLAQKLPYKKKNRILDENFKNKDQIEFISRNLNDTRYATSLIAKYTKEYLEFLPLSDDEDISLKSGEKGSKTHVQTMNGMLTSVLRHAWGFSQKDRNNHLHHALDAIIIAYSTNSIIKAFSDFKKNQEILKAKLYAKKLTSEEYKNQSKFTGFEKYRSKILEKLDSIFVSKPPNKNTKGALHEQTFYSYQDILEEYKTQEGLKRALECGKVRKIGTKYVVNDRMVRLDIFKKDNKFYGIPIYTMDFALGVLPNKVVTIGTDKDKIKKEWKTIDETYEFCFSLYKGDLVLIQKKEMQESEFAYYNGFDISSASISLEKHDNKFENLTENQKLLFPKAKEGDVEVRGIGIQGLKVFKKYMVTPLGEIQETRTEARQNIQPRKKHGLR

SEQ ID NO: 112 - protein, 1397 aa, Unknown
  gamma proteobacterium
MTKNYISPIAIDLGAKFTGVALYQYLEGADCTQEVAKGLLVDDRGNVTWSQEGRRGKRHQVRGYKRRKMAKRLLWLILDSEYGIKREEVTEPLLKFINGLLNRRGYTYISEEVDEESMNVSPLPFSEMMPDYFNSSAPLLEQLAKLLSDKNKLVRFRAEGKIPSNKNEFKKLLDTALDGKYKDEKKELSEAWGNILIASENVLKSTVDGHKSRSEYLANIKEDIKSNEELEKQISSKEIDGFYNLVGHLSNFQLRLLRKYFNDPNMSGVSYWDEKRLEKYFYQWVQGWHTKGGTDEAEKKNIILKTKGAPLLKTLKSLSADLTIPPYEDQNNRRPPKCQSVLLSDEKLTMHYPKWKEWVGQLVKQNDNAYLNENVTLANALHRIVERSRSIDPYQLRLLISITDAEKRNDLAGYKRLKLSLGSEVDEFLLLVKNIVDETKEAREGLWFETENKLFFKCGKTPPRKEKLKSTLLSAVLGKNLSDDEQSSFIEEFWKSGTPKIERRNVRGWCRLASQVQKTYGVYLKEYGLQQLHKLEAGKKLDDKPLALLYKNSGLIASKIGEALNIEPDEVSRFASPHSLAQIFNIIEGDVAGFNKTCRACTYENIWRMQEEKVESLLTNQLLSEIHGERKVPLKSAMCTRLSADSTRPFDGQMASIIEHIARKIAQHKIAQINDVPKEFSIDIPIIIESNQFSFTAELEEIKRGRGSAKAKKAKELGEKSKAGWVSKTERIKTSSEGICPYTGAPLGGSGEIDHIIPRSLTGRTKKTVFNSEANLIYCSSKGNHDKGNRVYVIEQLNDKYLKKQFSTSDVNLIKKKIKTTIQRFTEGGEKLRSFSELSREDQKAFRHALFVPELKSEVTSLLAVKNITRVNGTQAWLAKKIASLLAEHLDKQGRDYTLSAHQIDPWSVSKQRKMLASAEPIWAKKDPQPAASHVVDAVCTFLEALEQPHTASRLKTISSTSFEKTGWRSALIPDLIKVDALDRRPKYRRYNIGSTSLFKDGIYAERFLPILIDENGLMAGYDIDNSLKAKGADVVFESLSPFLLFKGEEVGAQSLSDWQERIDGRYLYMSIDKVKAFDYLQEKVGEKDIAAELLNSIHFTQRKTELRAKFSDDSGKKMKTLDAIRKSLKLTVTVNEIGKRKEKCGFSGTIGIPAKSAWENLLDEPLLETYWGTKMPPQEIWEKVYRKHFPRNIPNQAHRKVRKDFSLPVVDSVSGGFRVKRKTPNGYNYQLLAIDGYSAVGFKKEGDNVDFKSPALVPQIAESKSVTPISSELVHLDKNEIVYFDEWRKIDISDSDLKQFVSSLELAPGSQNRFYIRFTVDEDQFERHFKSALRVNGIQDLDTVNKTFDWNREIPSLLIPPRSNLFLLETGQKITFEYIANGANAEVKKAYSLRRA

SEQ ID NO: 113 - protein, 1082 aa, Neisseria meningitidis
MAAFKPNPINYILGLDIGIASVGWAMVEIDEEENPIRLIDLGVRVFERAEVPKTGDSLAMVRRLARSVRRLTRRRAHRLLRARRLLKREGVLQAADFDENGLIKSLPNTPWQLRAAALDRKLTPLEWSAVLLHLIKHRGYLSQRKNEGETADKELGALLKGVADNAHALQTGDFRTPAELALNKFEKESGHIRNQRGDYSHTFSRKDLQAELILLFEKQKEFGNPHISGGLKEGIETLLMTQRPALSGDAVQKMLGHCTFEPAEPKAAKNTYTAERFIWLTKLNNLRILEQGSERPLTDTERATLMDEPYRKSKLTYAQARKLLGLEDTAFFKGLRYGKDNAEASTLMEMKAYHAISRALEKEGLKDKKSPLNLSPELQDEIGTAFSLFKTDEDITGRLKDRIQPEILEALLKHISFDKFVQISLKALRRIVPLMEQGKRYDEACAEIYGDHYGKKNTEEKIYLPPIPADEIRNPVVLRALSQARKVINGVVRRYGSPARIHIETAREVGKSFKDRKEIEKRQEENRKDREKAAAKFREYFPNFVGEPKSKDILKLRLYEQQHGKCLYSGKEINLGRLNEKGYVEIDHALPFSRTWDDSFNNKVLVLGSENQNKGNQTPYEYFNGKDNSREWQEFKARVETSRFPRSKKQRILLQKFDEDGFKERNLNDTRYVNRFLCQFVADRMRLTGKGKKRVFASNGQITNLLRGFWGLRKVRAENDRHHALDAVVVACSTVAMQQKITRFVRYKEMNAFDGKTIDKETGEVLHQKTHFPQPWEFFAQEVMIRVFGKPDGKPEFEEADTPEKLRTLLAEKLSSRPEAVHEYVTPLFVSRAPNRKMSGQGHMETVKSAKRLDEGVSVLRVPLTQLKLKDLEKMVNREREPKLYEALKARLEAHKDDPAKAFAEPFYKYDKAGNRTQQVKAVRVEQVQKTGVWVRNHNGIADNATMVRVDVFEKGDKYYLVPIYSWQVAKGILPDRAVVQGKDEEDWQLIDDSFNFKFSLHPNDLVEVITKKARMFGYFASCHRGTGNINIRIHDLDHKIGKNGILEGIGVKTALSFQKYQIDELGKEIRPCRLKKRPPVR

SEQ ID NO: 114 - protein, 1334 aa, Listeria monocytogenes
MKKPYTIGLDIGTNSVGWAVLTDQYDLVKRKMKISGDSEKKQIKKNFWGVRLFEKGETAAKRRMSRTARRRIERRRNRISYLQEIFAIQMNEVDDNFFNRLKESFYAESDKKYNRHPFFGTVEEEVAYYKDFPTIYHLRKELIDSQKKADLRLVYLALAHIIKYRGHFLIEGALDTKNTSIDEMFKQFLQIYNQVFANDIEEASLKKTEKNQEVAQILAEKFTRKDKLDKILSLYPGEKTTGVFAQFVNIIVGSTGKFKKHFNLHEKKDINCAEDTYDTDLESLLAIIGDEFAEVFVAAKNAYNAVVLSNIITVTDSTTRAKLSASLIERFENHKEDLKKMKRFVRTYLPEKYDEIFDDTEKHGYAGYISGKTKQADFYKYMKATLEKIEGADYFIAKIEEENFLRKQRTFDNGVIPHQLHLEELEAILHQQAKYYPFLREDYEKIKSLVTFRIPYFVGPLAKGQSEFAWLTRKADGEIRPWNIEEKVDFGKSAVDFIEKMTNKDTYLPKENVLPKHSLCYQKYMVYNELTKVRYIDDQGKTNYFSGQEKQQIFNDLFKQKRKVKKKDLELFLRNINQIESPTIEGLEDSFNASYATYHDLLKVGMKQEILDNPLNTEMLEDIVKILTVFEDKRMIKEQLQQFSDVLDGTVLKKLERRHYTGWGRLSAKLLVGIRDKQSHLTILDYLMNDDGLNRNLMQLINDSNLSFKSIIEKEQVSTTDKDLQSIVAELAGSPAIKKGILQSLKIVDELVSVMGYPPQTIVVEMARENQTTNKGKNNSKPRYKSLEKAIKEFGSQILKEHPTDNQELKNNRLYLYYLQNGKDMYTGQELDIHNLSNYDIDHIVPQSFITDNSVDNLVLTSSAGNREKGDNVPPLEIVQKRKIFWEKLYQGNLMSKRKFDYLTKAERGGLTEADKARFIHRQLVETRQITKNVANILHQRFNYKTDGNKDTMETVRIVTLKSALVSQFRKQFQFYKVREVNDYHHAHDAYLNGVVANTLLKVYPQLEPEFVYGEYHQFGWFKANKATAKKQFYTNIMLFFAQKDRIIDENGEILWDKRYLETVKKVLGYRQMNIVKKTEIQKGEFSNVTPNPKGKSNKLIPRKKDWDPIKYGGFDGSKMAYAIIIEYEKQKRKVRIEKKLIQINIMEREAFEKDEKTFLEEKGYHQPKVLIKVPKYTLYECKNGRRRMLGSANEAHKGNQMLLPNHLMALLYHAEKYEAIDGESLAYIEVHRALFDELLAYISEFARKYTLSNDRLDEINMLYERNKDGDVKSIAESFVSLKKFNAFGVHQDFSFFGTKIERKRDRKLNELLNSTIIYQSITGLYESRKRLDN

SEQ ID NO: 115 - protein, 1337 aa, Enterococcus faecalis
MKKDYVIGLDIGTNSVGWAVMTEDYQLVKKKMPIYGNTEKKKIKKNFWGVRLFEEGHTAEDRRLKRTARRRISRRRNRLRYLQAFFEEAMTALDENFFARLQESFLVPEDKKWHRHPIFAKLEDEVAYHETYPTIYHLRKKLADSSEQADLRLIYLALAHIVKYRGHFLIEGKLSTENISVKEQFQQFMIIYNQTFVNGESRLVSAPLPESVLIEEELTEKASRTKKSEKVLQQFPQEKANGLFGQFLKLMVGNKADFKKVFGLEEEAKITYASESYEEDLEGILAKVGDEYSDVFLAAKNVYDAVELSTILADSDKKSHAKLSSSMIVRFTEHQEDLKKFKRFIRENCPDEYDNLFKNEQKDGYAGYIAHAGKVSQLKFYQYVKKIIQDIAGAEYFLEKIAQENFLRKQRTFDNGVIPHQIHLAELQAIIHRQAAYYPFLKENQEKIEQLVTFRIPYYIGPLSKGDASTFAWLKRQSEEPIRPWNLQETVDLDQSATAFIERMTNFDTYLSSEKVLPKHSLLYEKFMVFNELTKISYTDDRGIKANFSGKEKEKIFDYLFKTRRKVKKKDIIQFYRNEYNTEIVTLSGLEEDQFNASFSTYQDLLKCGLTRAELDHPDNAEKLEDIIKILTIFEDRQRIRTQLSTFKGQFSAEVLKKLERKHYTGWGRLSKKLINGIYDKESGKTILGYLIKDDGVSKHYNRNFMQLINDSQLSFKNAIQKAQSSEHEETLSETVNELAGSPAIKKGIYQSLKIVDELVAIMGYAPKRIVVEMARENQTTSTGKRRSIQRLKIVEKAMAEIGSNLLKEQPTTNEQLRDTRLFLYYMQNGKDMYTGDELSLHRLSHYDIDHIIPQSFMKDDSLDNLVLVGSTENRGKSDDVPSKEVVKDMKAYWEKLYAAGLISQRKFQRLTKGEQGGLTLEDKAHFIQRQLVETRQITKNVAGILDQRYNANSKEKKVQIITLKASLTSQFRSIFGLYKVREVNDYHHGQDAYLNCVVATTLLKVYPNLAPEFVYGEYPKFQAFKENKATAKAIIYTNLLRFFTEDEPRFTKDGEILWSNSYLKTIKKELNYHQMNIVKKVEVQKGGFSKESIKPKGPSNKLIPVKNGLDPQKYGGFDSPVVAYTVLFTHEKGKKPLIKQEILGITIMEKTRFEQNPILFLEEKGFLRPRVLMKLPKYTLYEFPEGRRRLLASAKEAQKGNQMVLPEHLLTLLYHAKQCLLPNQSESLAYVEQHQPEFQEILERVVDFAEVHTLAKSKVQQIVKLFEANQTADVKEIAASFIQLMQFNAMGAPSTFKFFQKDIERARYTSIKEIFDATIIYQSTTGLYETRRKVVD

SEQ ID NO: 116 - protein, 1426 aa, Capnocytophaga ochracea
MKNILGLDLGTTSIGFAHIVEDENKEKSEIKELGVRIVSLTTDEQSDFEKGKSITTNANRTLKHGARLNLDRYQQRRKYLIDLLQKANLITPSSILAENGKNTTHSTWQLRAKAVTERIEKEEFARILLAINKKRGYKSSRKAKTEDEGQAIDGMAIAKRLYDENLTPGQLSLQLLQQNKKLLPDFYRSDLQKEFDLVWNFQKQFYPDILTDIFYKELQGKGKDATSKAFSKRYHFDTTENKGSKESVRLQAYQWRAEAISKQLSKEEVAYVLTEINNNLNNASGYLGAISDRSKELYFNRQTVGQYLYAKLQENRHNSLKNKVFYRQDYLDEFERIWETQASFHKELTDELKKQIRDVVIFYQRKPKSQKGLISFCEFESKEIEIEKDGKTITKNIGARVVPKSSPLFQEFKIWQILNNVICKRKGIRKKKISAKTTQLDLLNESSQTIFSLDMECKQLLFDELNLKGDLKSDKVLKLLGYSPQEWEINYNQLEGNRTQKALYEAYLKIVEMEAHDVKDILQIKSAKDDWSLDESPLSASEIREKVKAIFQTLGICTKILYFDPLLPVKEFEEQDSYQLWHLLYSYESDDSTSGNETLYRILEKKYAFKREHARILANVALQDDYGSLSTKAIRKIYPNIKENQYSTACEKAGYKHSKLSLTTEELEARELKNIIPLLKKNALRNPVVEKILNQMINVVNALIEKNSERDAEGKITKYFHFDEIRIELARELKKNAQKRYEMTQNINKAKLEHQKISEILQKEFGIKNPTKSDIIRYRLYQELEHNGYKELYTNAPIARDMLFSKNIEIEHIVPKARVFDDSFSNKTLTFHRINSDKGEYTAFDYITSLNSEEELNQYLTRVENAYKTKSISPTKYKNLLKKASEIGDDFINRDLRDTQYIAKKAKEILFQVTKNVLSTSGSITDRLREDWGLVDVMKELNMPKYQSLGLTEVEERKDGNKVTVIKNWTKRNDHRHHAMDALTVAFTKPSYIQYLNHLNARKDENNKNYSVILAIEEKETIKVPTNNGKNKRVFIEPIPNFRQVAKKHLEEIFISHKAKNKVVTKNTNKPAGTDKQQITLTPRGQLHKETIYGKYQYYINKEEKIGVKFDERTIAKVSNPVYREALLKRLQANDNDPKKAFAGKNALSKNPIYLDESKTKTLPEKVNLTYLEEDFSIRKDISPDNFKDLKSIEKVIDQGVKRILIKRLQAYDNDPKKAFVDLEKNPIWLNKEKGIAIKRVTISGVNNAQPLHIGKDHLGKTTLNKEGKEIPVDYVSTGNNHHVAIYRDKEGNLQEQIVSFFDAVVRAQQGIPIIDKTYKQAEGWQFLFTMKQNEMFVFPNATTGFNPAEIDLLDPKNKKLISPNLFRVQKIATKDYFFRHHLETNVETDNILKNVTWKREGLSGLKDIVKVRINHLGDIVSIGEY

SEQ ID NO: 117 - protein, 1424 aa, Unknown
  Parabacteroides sp.
MKRILGLDLGTNSIGWALVNEAETDEEVSSIIRLGVRVNPLTVDETQNFEKGKSITTNAERTLKRSMRRNLQRYKLRRDALVEFLKELGFITDETILSEQGNRTTFETCRLRAKAAEEEISLEELSRVLLMINKKRGYKSSRKVKKEEDGVLIDGMEIAKKLYEEDLTPGQLCSQLLESGKKVLPDFYRSDLQEELDRIWSVQKQFHPDVFCDAAKEEIKGKNRSQTWAILANYFVWKEEVVGWNDREAKNETIEKECKLVGLKRTTKGYELKKENYRWRAQALTEQLGLEEIAVVLQEINGQINASSGYLGAISDRSKVLYFNHQTVGQYQMAELDKNPHASLRNMVFYRQDYLDEFDRIWEKQAEFHKELTAELKKEIRDMIIFYQRRLKSQKGLISFCEFERLEIVVEKDGKKQTKVIGCKVIPRSHPLFQEFKVWQTLNDIKVLGREKKRNALSASESRALYPEEKEILARELAIKENMKKADVLKLLFENPQELDLNFKQIDGNRTGFSLFSAYSKMIEKYGYEPLDFKKPADEIIGQLRTIFTDLGWNTNLFTIDLTKEGKELEMQPYFRLWHLLYSFEGDNTSTGNGKLIEKIMQLCGVEKEYAVELASLSFQDDYGSLSAKAIKRILPYLKEGNLYDVACEYAGYRHSKSSLTKEEIENKVLKGKLEVLPKNSLRNPVVEKILSQMVNVINTIIDTYGKPDEIRVELARELKKSAKEREELTKAIAKSTREHEEIRKLLQDEFGMMNVSRNDIIRYKLYEELKDNGYKTLYSNQYIPKEKIFSKEIDIEHIIPQSRLFDDSLSNKTLEYKAINIEKGNKTAYDFVKEKYGEEGLQQYINRCESLFNDKKAKLRKLKMEQKDIPDGFIDRDLRNTQYIAKKALAMLNEICRRVVATTGSITDQLREDWQLVDVMKELNLPKYEALGFVETYEDKDGRKIKRIKDWTKRNDHRHHAMDALTVAFTKDAFIQYFNNKNAAQDSGNRNHTNIIGIKTRYFDKGRALPPIPLEQFRIEAKQHLEKLLVSIKAKNKVVTVNVNRTKKRKGENTKIQQTPRGQLHLETVYGSHKQYVTKIEKVNASFDAAKIATVSKRAYRNALLKRLETFGNDPKKAFTGKNALEKNPLYADKYQTIRVPEKVQTVEFETIYTIRKPVDPALNVDKVVDVKVRAILERRLKEYGGDPKKAFVNFWENPIWLNKEKGISIKRVSIRGINNAQSIHVKKDKNGNPIWDENGKQIPVDFVNTGNNHHVAIYRKPVLDKKGQVTFDEDGNLMYELDEVVVPFFEAVTRANLGLPIIDKDYRKSEGWQFLFSMKQNEYFVFPNEKTGFNPKEVDLLNPDNYAMISPNLFRVQTMSKVMYGNNVVRDYKFRHHLETTVKDMKELKDIAYKQYKTLSFGNSVVKIRINHIGQIVSVGEY

SEQ ID NO: 118 - protein, 1395 aa, Unknown
  Lactobacillus jensenii
MKEIKDYIIGLDIGTNSCGYVVTDKQNNILKLKGKTAIGARLFKEGQAAADRRSFRTTRRRLARRHWRLGLLEEIFDPEMEKIDPNFFRRLKESDYSPKDSRKQFNAIVFKSIKADKRFYKKYPTIYHLRNALMHDNQKHDLREIFMAVHHIVKYRGNFLREDSVNAFKAAKFSLRGEDGIGPVDKLNDLLKEIYSEYSPELATNNLSKIEDIIKDKNLYKQDKLKQVATLLIKEADSKDKAKLNKDIAKQVANSFMGYMFRLDTLFSLTDVDVKDYKLKFSDANIDESLDDLTSLLTDAQIEFVLELQSIYNTIVLNEIVPDGMSLSESMIKKYDDHKEDLKIFKEYIDSLSDQKKAKKLLSAYNLYVNYRKSDLVEAKNLFKNKKVGDKNFADVISNFEVFGKFVSDNLDDSELANKIKARLDLGEFLPKQRTNQNGVIPYQLHQVELTQILEKQGKYYPFLITPNPVESHRNNAPYEISELVSFRVPYYVGPLIDNQSIKDKQNKNKFAWMVRQKQGQITPWNLEEMVDTTESANQFIKRMTRKDTYLLAEDVLPKSSLVYQKFMILDELNRIKIDGKKLTSELKHDIFEKLFKKQKSINLDNLKNYLLVEGNIPGLIEGLSDGINFNNSFSTYIDYRNIFGDEIDNPNKQADFEKMIEWSTVFEDRKIFKRKLKEITWLTSEQIKQVSSKRYSGWGRLSKKLLTQITDENGVNILQRLWNEPETLTEVLANPVIKRKIVEANSSFTKAKDMKDILVEAYTSPQNKKAIRQVMRVVDDIIAAAHGKKPSQIAIEFAREDQDNPQMTKSRKAQLDQIYAKISDEFLDDAVKNELKNMKDNKPLAKDKVFLYFKQMGRDAYSGEKLSLDNLQDYDIDHIYPQSFIKDDSFDNRVLVQRAYNNGKSDNVPVLLFGNKIAAGLGITIRQMWKKWLELGLISKRKFNNLITDPEKISRNMASGFVNRQLVETSQVIKLVANILQAKLPDTEIIEVKASYNSILRKEFNLYKSREVNDYHHAIDAYLTTIVGNYLYQVYPKLRPYFVYGQFKKFGKAENQEDDPVKKIKKFNFIYQLIWGKDDAICISHTNQQVFSKKDIIDKLTTAYNFKYMNISHAVYTRNNNMFKQTLFPIIERTTAKTKSLIPKKLDRPTDIYGGYSNNNDAYLALVKVDKKRGSEYRVVGIPMRAAAMLKASKNYDEDLRKVIEPMVMFDKNGKAKRGIEGFRVLVGKMPFKQAVLDGNKKFMLTGTVDTPNLKQLVLSQQNMKYILDYIEDVDCRKHKFGDKVQNPDKCLLEVFDEIIEIVDKYFELFDSRDFREKLRNSRNKFIKLEASKKADTILAILKGLQAKSTRATIKELNISDFGRIITSSISPEAQLIYQSPTGLFERRVKVKDL

SEQ ID NO: 119 - protein, 1140 aa, Roseburia intestinalis
MRENGSDERRRNMDEKMDYRIGLDIGIASVGWAVLQNNSDDEPVRIVDLGVRIFDTAEIPKTGESLAGPRRAARTTRRRLRRRKHRLDRIKWLFENQGLINIDDFLKRYNMAGLPDVYQLRYEALDRKLTDEELAQVLLHIAKHRGFRSTRKAETAAKENGAVLKATDENQKRMQEKGYRTVGEMIYLDEAFRTGCSWSEKGYILTPRNKAENYQHTMLRAMLVEEVKEIFSSQRRLGNEKATEELEEKYLEIMTSQRSFDLGPGMQPDGKPSPYAMEGFSDRVGKCTFLGDQGELRGAKGTYTAEYFVALQKINHTKLVNQDGETRNFTEEERRALTLLLFTQKEVKYAAVRKKLGLPEDILFYNLNYKKAATKEEQQKENQNTEKAKFIGMPYYHDYKKCLEERVKYLTENEVRDLFDEIGMILTCYKNDDSRTERLAKLGLVPIEMEGLLAYTPTKFQHLSMKAMRNIIPFLEKGMTYDKACEEAGYDFKADSKGTKQKLLTGENVNQTINEITNPVVKRSVSQTVKVINAIIRTYGSPQAINIELAREMSKTFEERRKIKGDMEKRQKNNEDVKKQIQELGKLSPTGQDILKYRLWQEQQGICMYSGKTIPLEELFKPGYDIDHILPYSITFDDSFRNKVLVTSQENRQKGNRTPYEYMGNDEQRWNEFETRVKTTIRDYKKQQKLLKKHFSEEERSEFKERNLTDTKYITTVIYNMIRQNLEMAPLNRPEKKKQVRAVNGAITAYLRKRWGLPQKNRETDTHHAMDAVVIACCTDGMIQKISRYTKVRERCYSKGTEFVDAETGEIFRPEDYSRAEWDEIFGVHIPKPWETFRAELDVRMGDDPKGFLDTHSDVALELDYPEYIYENLRPIFVSRMPNHKVTGAAHADTIRSPRHFKDEGIVLTKTALTDLKLDKDGEIDGYYNPQSDLLLYEALKKQLLLYGNDAKKAFAQDFHKPKADGTEGPVVRKVKIQKKQTMGVFVDSGNGIAENGGMVRIDVFRVNGKYYFVPVYTADVVKKVLPNRASTAHKPYGEWKVMEDKDFLFSLYSRDLIHIKSKKDIPIKMVNGGMEGIKETYAYYIGADISAANIQGIAHDSRYKFRGLGIQSLDVLEKCQIDVLGHVSVVRSEKRMGFS

SEQ ID NO: 120 - protein, 992 aa, Unknown
  Treponema vincentii
MQKNSGEDENCGFEFLTEEEKELIKPLFFRISKPSFQFADIEKKLKGKNGFWKFNYRKDTNVSGCPVSAGLKNIFGDEASAESWKDKKVGQYDMCDIWHVLFDFDDEEKLLEFAKRKLFLSDEAAKKFCAIRIQQGYANLSLKAIRKITPFLRKGYIYSTAVFLANIPFMIGRDIFLQNEKEIEDSVKNIIGTLRDKNNIIVLANRCIESAFKDKDNDFRFEEWDKALVENSAWDLFGKKKWNEYDEEKRKTIISQVSEKVEDNLKIAVGKNPNDYKYPLLRTDDLIMDYLNQKGFVVKGELYHPSDTDYNFETPVPAEDGKIYLASPRSPSVKNPVVMRALHQLRKLVNYLIKTGKIDSTTKINVELANDVNDKNQRKAIEELAKTNEKNNADARKKIEELCNEAGFKVVPTESDIKKFRLWKEQNETCPYTGKHISFTDLFGPIPKFDFEHTIPRSLSYDDSLENLTLCDSEFNRNIKKQRLPSELPDFEEINKRFLKFYEDKIDNCLRIIELNSKSGGSYEEPAVKDLRIVKKHKAQYELNYYKEKLRRFSSTEITSGFKHSQLNDTRIITKFSLSYLKGVFDHVQPVKGSMTDTFKRQWGLMERNEIKDRSNHTHHTVDALTVACINRGKFNLLSEAIKNSSDGKHLKFPKPWETFDTDVLNAVRYIIPKYFSDESSLRQSKKILRGRDGKPVLKNGKAVFIQGATARGSLHKDTFYGCIKTVPEKGGKSEMIFVQRIPVSTLDEKVAEKIIDKRIRKTFEKNLSTGIQTLQEIQTDGILLPFKKEGRDVFVKRVRIKAHPTSPIILKKHHNVINKNPKDYKQNYYVENEENYLLAIYRGKDAKGKDVSDHKLCNLLNAVKSRQNKTGFYPDFKEKKGINLQLYKVLKIGKIVILQNDIQEDVFALPKEKLWKRMYRIAGLATSRNDIQIKLVHIIRETPWGYMKGEKDLNAGKECLLYGTANFKGLVEGQDFTVSPAGEIIQKARVC

SEQ ID NO: 121 - protein, 1340 aa, Enterococcus faecium
MKKEYTIGLDIGTNSVGWSVLTDDYRLVSKKMKVAGNTEKSSTKKNFWGVRLFDEGQTAEARRSKRTARRRLARRRQRILELQKIFAPEILKIDEHFFARLNESFLVPDEKKQSRHPVFATIKQEKSYHQTYPTIYHLRQALADSSEKADIRLVYLAMAHLLKYRGHFLIEGELNTENSSVTETFRQFLSTYNQQFSEAGDKQTEKLDEAVDCSFVFTEKMSKTKKAETLLKYFPHEKSNGYLSQFIKLMVGNQGNFKNVFGLEEEAKLQFSKETYEEDLEELLEKIGDDYIDLFVQAKNVYDAVLLSEILSDSTKNTRAKLSAGMIRRYDAHKEDLVLLKRFVKENLPKKYRAFFGDNSVNGYAGYIEGHATQEAFYKFVKKELTGIRGSEVFLTKIEQENFLRKQRTFDNGVIPHQIHLSELRAIIANQKKHYPFLKEEQEKLESLLTFKIPYYVGPLAKKQENSPFAWLIRKSEEKIKPWNLPEIVDMEGSAVRFIERMINTDMYMPHNKVLPKNSLLYQKFSIYNELTKVRYQDERGQMNYFSSIEKKEIFHELFEKNRKVTKKDLQEFLYLKYDIKHAELSGIEKAFNASYTTYHDFLTMSENKREMKQWLEDPELASMFEEIIKTLTVFEDREMIKTRLSHHEATLGKHIIKKLTKKHYTGWGRLSKELIQGIRDKQSNKTILDYLINDDDFPHHRNRNFMQLINDDSLSFKKEIKKAQMITDTENLEEIVKELTGSPAIKKGILQSLKIVDEIVGIMGYEPANIVVEMARENQTTGRGLKSSRPRLKALEESLKDFGSQLLKEYPTDNSSLQKDRLYLYYLQNGRDMYTGAPLDIHRLSDYDIDHIIPRSFTTDNSIDNKVLVSSKENRLKKDDVPSEKVVKKMRSFWYDLYSSKLISKRKLDNLTKIKLTEEDKAGFIKRQLVETRQITKHVAGILHHRFNKAEDTNDPIRKVRIITLKSALVSQFRNRFGIYKVREINEYHHAHDAYLNGVVALALLKKYPQLAPEFVYGEYLKFNAHKANKATVKKEFYSNIMKFFESDTPVCDENGEIFWDKSKSIAQVKKVINHHHMNIVKKTEIQKGGFSKETVEPKKDSSKLLPRKNNWDPAKYGGLGSPNVAYTVAFTYEKGKARKRTNALEGITIMEREAFEQSPVLFLKNKGYEQAEIEMKLPKYALFELENGRKRMVASNKEAQKANSFLLPEHLVTLLYHAKQYDEISHKESFDYVNEHHKEFSEVFARVLEFAGKYTLAEKNIEKLEKIYKENQTDDLAKLASSFVNLMQFNAMGAPADFKFFDVTIPRKRYTSLTEIWQSTIIHQSITGLYETRIRMGK

SEQ ID NO: 122 - protein, 1363 aa, Lactobacillus rhamnosus
MTKLNQPYGIGLDIGSNSIGFAVVDANSHLLRLKGETAIGARLFREGQSAADRRGSRTTRRRLSRTRWRLSFLRDFFAPHITKIDPDFFLRQKYSEISPKDKDRFKYEKRLFNDRTDAEFYEDYPSMYHLRLHLMTHTHKADPREIFLAIHHILKSRGHFLTPGAAKDFNTDKVDLEDIFPALTEAYAQVYPDLELTFDLAKADDFKAKLLDEQATPSDTQKALVNLLLSSDGEKEIVKKRKQVLTEFAKAITGLKTKFNLALGTEVDEADASNWQFSMGQLDDKWSNIETSMTDQGTEIFEQIQELYRARLLNGIVPAGMSLSQAKVADYGQHKEDLELFKTYLKKLNDHELAKTIRGLYDRYINGDDAKPFLREDFVKALTKEVTAHPNEVSEQLLNRMGQANFMLKQRTKANGAIPIQLQQRELDQIIANQSKYYDWLAAPNPVEAHRWKMPYQLDELLNFHIPYYVGPLITPKQQAESGENVFAWMVRKDPSGNITPYNFDEKVDREASANTFIQRMKTTDTYLIGEDVLPKQSLLYQKYEVLNELNNVRINNECLGTDQKQRLIREVFERHSSVTIKQVADNLVAHGDFARRPEIRGLADEKRFLSSLSTYHQLKEILHEAIDDPTKLLDIENIITWSTVFEDHTIFETKLAEIEWLDPKKINELSGIRYRGWGQFSRKLLDGLKLGNGHTVIQELMLSNHNLMQILADETLKETMTELNQDKLKTDDIEDVINDAYTSPSNKKALRQVLRVVEDIKHAANGQDPSWLFIETADGTGTAGKRTQSRQKQIQTVYANAAQELIDSAVRGELEDKIADKASFTDRLVLYFMQGGRDIYTGAPLNIDQLSHYDIDHILPQSLIKDDSLDNRVLVNATINREKNNVFASTLFAGKMKATWRKWHEAGLISGRKLRNLMLRPDEIDKFAKGFVARQLVETRQIIKLTEQIAAAQYPNTKIIAVKAGLSHQLREELDFPKNRDVNHYHHAFDAFLAARIGTYLLKRYPKLAPFFTYGEFAKVDVKKFREFNFIGALTHAKKNIIAKDTGEIVWDKERDIRELDRIYNFKRMLITHEVYFETADLFKQTIYAAKDSKERGGSKQLIPKKQGYPTQVYGGYTQESGSYNALVRVAEADTTAYQVIKISAQNASKIASANLKSREKGKQLLNEIVVKQLAKRRKNWKPSANSFKIVIPRFGMGTLFQNAKYGLFMVNSDTYYRNYQELWLSRENQKLLKKLFSIKYEKTQMNHDALQVYKAIIDQVEKFFKLYDINQFRAKLSDAIERFEKLPINTDGNKIGKTETLRQILIGLQANGTRSNVKNLGIKTDLGLLQVGSGIKLDKDTQIVYQSPSGLFKRRIPLADL

SEQ ID NO: 123 - protein, 1234 aa, Unknown
  Prevotella tannerae
MPNFWSIFTENLQTYLMKTRILGLDTGTNSLGWAVVDRDENNQYTPICRGDLIFTEGVKQEKGIEFSLAAERTSYRASRRHYFRRRLRKVEVLKVLVKHKLCPPLSDEALNRWHTKKEYPLDEDFILWQRTNEADNKNPYHDRHICLHRKLNLKDSQTDRYTLGRALYHLTQRRGFLSNRLDQNEEAEETGKVKSAISELSKEMKEAGCEFLGDYFYLLYRTEGNRVRIRSRYTDREKHYLQEFKEICRVQELDEDLAKALEKTIFFQRPLKSQRQGVGKCTMEKGHSRCAVSHPLYEEYRLLCYLNNIRIKTPSDDRLRPLNAEEREKITPLFYKEKNFDFEKIAKKLAGKTPFGWIRDAEDWPYQFNYRMTQEAPACPTTAQLIKVFGEDWKAALAETYTMSAKQDGTLKTEDEICTDIWNVLYSFSSKEKLKEFGLKKLQLDEVQAKAFSEIRLTRDFASLSLKAIRKILFFLRTGEDYSKAIFLANIPTIVGEEIWNDIERRSRLLYKVDLALRPQEERDAEEHRTIAERIKAAVAAEVPDAPIDLLYHPSMIEAYPDAKRNERFDCYQLGSPKTNAVRNPMAMRSLHMVRKVINHLLRKHIIDEKTEIHIEYARELNDANKRQAIADWQRELSKRHTAYAQNIRQLYKAETGLVIEPTKADILKYQLWEEQQHVCLYTGKKIGIADFLGANPKFDIEHTIPRSRGGDSTQENLTLCESKFNRDIKRDKLPTELANYEEILARIEHWKKQCYALKLKRDGIRTHSGLEKSIKDSRIRRRHLVGLEYGYLKGKYDRFTMKEVPEGFSRRQGAGIGLISKYAGLFLKSLFKDPKNPNRSNVYVVKGAITAEFRKLWGLQQADEAKSRENHTHHCIDAYTIACIGPCEYAALAAYYRSDEEFKYGRRREKPQFEKPWPTFTEDLLKLQEELLIVHQTTDKLGKRDRRKVKTPRGKFLTGGDSARGRLHQETYYGAINYDGNIKYVVRKPLDSLTEKDLDKIVDETVMGIVKGAVEAKGSLKEALADGIYMNKEKGILIKRVRIFSDVSEPINLKQLRDVSTKEYKRHIHLRKDENYLFAIYEGIDKKKNKKQTETATVDYLDAAKFYKDSKRRDKANSLVGDYSKKNKLPLKCILKKRQMVLFYEHSPEEIRFKDKKDLSRRLYIVTSIAKDGRVKFLHHQAATATGIQSSPSPFTNDGEHQPYYRLSASNIKVLVAGIDFDINILGEITPKL

SEQ ID NO: 124 - protein, 1496 aa, Prevotella veroralis
MKTILGLDLGTNSIGWAKVCVDDNGNYLRDIKLGSRIIPMSQDVLGNFDKGVTESQTSVRTGFRGVRRIRERSLLRRERLHRVLHVLGYLPPHYDSAIGWNKNEPSTYGKFLNHGEPKLAWEHKEDGSMRFLFMESFHEMMADFAKSQPSLVSDGKKIPLDWTIYYLRKKALSQPIRKEELAWLLLNFNQKRGYYQLRGEEDDDNPTKCEEYYELKVVGIEADEEGKNGNTWYNVKLENGWIYRRQSKIPLDDWIGKVREFIVTTEYEKDGITLKKDKNGDVKRSFRSPSEDDWGLRKKRTEKLLDSSKMTVGAFVYDHLLAEPSDKIRGKFIRTIERKYYKKELYAILCEQSKYHEELRSGDYLNKCAEELYKNNQPHRNSLLTKDLAYLLLEDLIFYQRPLKTKKSLIAECPYEAYKYVDKETGEIKRQGIKCIAKSNPYYQEFRLWQFISNLRLFNKADDKEVTADYLPTQDDYVRLFAYLNDRKEINQETLLKEFFKLKKITVNSEKVFPIRWNYIEDKEKKYPCNETRHELLLALDRARIDHSWLEKPGQEYRLWHLLYSVESKEETKEALRKLKDDDAFVESFLKVKPFKREYGAYSEKAIKKLLAVMRMGSLWRETDICDTTKGNITKILQGEIDEKLKEKISASVSSYNQLSDFQGLPVWLACYVVYGRHSEAAEIQHWKTPESLLAYINGFKQHSLRNPIVEQCILETLRTVHDIWKEVGHIDEIHVELGRNMKSTADQRARISENVLRNENTNLRIKSLLLELKNDPNIKDVRPYSPMQQEKLRIYEEGVLQELTKDDKDFTEITKISTMAQPSAKELQRYKLWLEQKYRSPYTGKSISLTKLFTSAYQIEHVIPQSRYFDDSFSNKVICESEVNSLKDNMLGYEFIKNHGGEIIHCTMLGDVKVLSESEYKAFVNDHYAHNKRKRENLLLEDIPQEFLNRQMNDSRYISKVVKALLSNIVRAEGEEEATSKFVVSCSGGITDRLKKDWGLNDVWNKIVYPRFERLNRLTGTEAFGQWENKDGKRVFQTAVPLELQRGFNKKRIDHRHHAMDALVIACTSRNIINYLNNESANNPKKREDLRQKLCDKNRTIRKPWETFTQDATAALEDVIVSFKNYVRIINKATNYYERYDVEGKKVIAEQRGDDMWAIRKPMHEATYYGRVNLRRKKKVNLRVALENISSICDNKLRIYINGLVEKGFNTKQILDKFKNTNDHFSMQKIDKVEIWQFTNEEEKLVATRKPLDTSFDTKKIASITDTGIQTILLNYLETKGGDSTIAFTPEGIVEMNQNISKYNNGKEHMPILKVRLYTKLGKKIPVGQTGCKAKQFVIAEAGTNLYFAIYEDEEGKRSYRTIPLNEVVERLKQGLSPVPEKNDKDVHLKFYLSPNDLVYVPIEDEHESLAKDHIYKFVDSSGTTANFIPHRSANVIFELNKKDAEKFCSGSIIQNEYGVGSSQSKNQKAITGEMIKAVCRKLEVDRLGNVIKVI

SEQ ID NO: 125 - protein, 1082 aa, Neisseria cinerea
MAAFKPNPMNYILGLDIGIASVGWAIVEIDEEENPIRLIDLGVRVFERAEVPKTGDSLAAARRLARSVRRLTRRRAHRLLRARRLLKREGVLQAADFDENGLIKSLPNTPWQLRAAALDRKLTPLEWSAVLLHLIKHRGYLSQRKNEGETADKELGALLKGVADNTHALQTGDFRTPAELALNKFEKESGHIRNQRGDYSHTFNRKDLQAELNLLFEKQKEFGNPHVSDGLKEGIETLLMTQRPALSGDAVQKMLGHCTFEPTEPKAAKNTYTAERFVWLTKLNNLRILEQGSERPLTDTERATLMDEPYRKSKLTYAQARKLLDLDDTAFFKGLRYGKDNAEASTLMEMKAYHAISRALEKEGLKDKKSPLNLSPELQDEIGTAFSLFKTDEDITGRLKDRVQPEILEALLKHISFDKFVQISLKALRRIVPLMEQGNRYDEACTEIYGDHYGKKNTEEKIYLPPIPADEIRNPVVLRALSQARKVINGVVRRYGSPARIHIETAREVGKSFKDRKEIEKRQEENRKDREKSAAKFREYFPNFVGEPKSKDILKLRLYEQQHGKCLYSGKEINLGRLNEKGYVEIDHALPFSRTWDDSFNNKVLALGSENQNKGNQTPYEYFNGKDNSREWQEFKARVETSRFPRSKKQRILLQKFDEDGFKERNLNDTRYINRFLCQFVADHMLLTGKGKRRVFASNGQITNLLRGFWGLRKVRAENDRHHALDAVVVACSTIAMQQKITRFVRYKEMNAFDGKTIDKETGEVLHQKAHFPQPWEFFAQEVMIRVFGKPDGKPEFEEADTPEKLRTLLAEKLSSRPEAVHKYVTPLFISRAPNRKMSGQGHMETVKSAKRLDEGISVLRVPLTQLKLKDLEKMVNREREPKLYEALKARLEAHKDDPAKAFAEPFYKYDKAGNRTQQVKAVRVEQVQKTGVWVHNHNGIADNATIVRVDVFEKGGKYYLVPIYSWQVAKGILPDRAVVQGKDEEDWTVMDDSFEFKFVLYANDLIKLTAKKNEFLGYFVSLNRATGAIDIRTHDTDSTKGKNGIFQSVGVKTALSFQKYQIDELGKEIRPCRLKKRPPVR

SEQ ID NO: 126 - protein, 1512 aa, Fibrobacter succinogenes
MKKILGLDLGTNSIGWAVVNADEITRDDGSRYLKPNGISAAGSRIIPMSADILGDFEKGNSISQTAERTRMRMARRLHERALLRRERLLRVLNLLDFLPKHFADKIDRYGKFTDDSEPKLAWRKNTEGKYEFIFQDAFNEMLAEFKDKQPEIVEEGKKIPYDWTIYYLRKKALEKALSKEELSWILLQFNQKRGYYQLRGEEEEIPQDKKIEYLAQKVVKVEATDQKKGDDVWYNVYLENGMIYRRTSKAPLDWEGKVKEFIVTTEVENDGETPKKDKEGNIKRSFRAPKEDDWTLLKKKTEADIENSHKTVGCYIYDSLLNNPKQKIIGKLVRTVERKFYKEELTQILKKQVELIPELRDDNLYKQCIEELYPINEAHRNTIAKTDFANLFINDILFYQRPLKSKKSQIDNCPYEERIFIDSKTGEKKKVPVKCIAKSNPLFQEFRLWQFIQNLRIYQREKEIDGKLLTDIDITSECLKSEEDYVRLFDWLNDRETIEQEDLLKHLFNTKKSKNKENPYRWNYVEDKVYPCNETRATILKGFSKCGINASVLSPELEMALWHILYSVEDKKEIETALTHFAQKQGWNDDFAKVFSKAKPFKKDYGSYSEKAIKKLLSLMRMGKYWNQDNIDKNTLDRIDKIINGEYDEKISNRVRDNAINLKDISDFRGLPVWLACYIVYDRHSEAKDCTKWNSPEEIDSYLKKFKQHSLRNPIVEQVVTETLRTVRDIWIQEEQIDEIHLELGRDLKNPADKRKKMSENILKNENTNLRIKAMLMEFMNPSMGIENVRPYSPSQQDILRIYEENALDNLTKDDKDFDFISKISKQAQPSKTDIIRYKCWLEQKYRSPYTGKTISLSKLFTPAYEIEHVIPQSLYFDDSFSNKVICEAEVNKLKDRQLGYKFIAEHHGEKVQLSQGEVVEILSVDAYEKFVKENYANNRIKMKKLLMESIPDEFIERQLNDSRYISKVVKGLLSNIVREKIDDENYEPEAVSKNLISCNGAITDRLKKDWGMNDVWNSIILPRFIRMNQITGKDCFTTTNAEGHLIPQMPLELQKGFNKKRIDHRHHAMDAIVIACTTRDHVNLLNNEAAHSKFNATRYQLQRKLRRFEKAVIDGKEREVAKEFLKPWDSFSSDSKNILENIIVSFKQNQRVINKTTNAFLHFDENGKKTFIKQGKGDSWAIRKSMHKDTVFGEINLRKVRSVSLNEAIKVPERVLNKKIKEKILELKNNKIDAKNIKKYIEENHTGGYGIDSSKIDVFYFTKETKERFFATRKTLDTSFNQAKIKDSIADSGIQKILLAHLKSKNGDAEQAFSPDGIDEMNKNIVELNNGKFHQPILKVRVYEKADKFAVGQKGNKKVKFVEAAKGTNLFFAIFEKDGKRSYLTIPLNVMIDCQKQYGNQWKNNIEAYLKEKELVEKDVKLQFILSPNDLVYLPTEGSIDKKRIYKVVSFTNNRLYAIPYAIAKSIVDKNEFTQLNKIEFTDNKESIKDACVPVIIDRLGNVIEFNGKRL

SEQ ID NO: 127 - protein, 1259 aa, Streptobacillus moniliformis
MKYILGLDLGVASIGWAVTEINEKGEPVGLIDANSVIFKPLDNDKGKLYNVERRDKRGSRRILRRKKHRVERTKMLLVNSSFLTNEEIDNLYVGKLDNIYEVRLKGLKEQLSKNEIARLMIYYCKNRGFKSNRKTEDLEILKSLGEKISEKDSDEKKLKPIIAKNTELIESKGLTPIEVIYMIRENDNSILGFKNKEGNYKFGFKRNQVIDEVRKILGTQQILSKEIVDEYIDILSSQRDFSDGPGGDSKYKIDYTKLAGKCKYTGEVRAVKSAPSYEIFTMLQKLNDIRYVKFTSEDKIEKKKLSKEVIHKLYDLVVEKNKTLTYDLIEKSIDEENIKLLNIPKLSKSKYVELRKSYFKERNDNENLTEEEINAFNEKLNNERMKQELIRNNLKAYKELKSKFKKNNIDENRIKELGGIYFLDLVAELLTYSKTDEKLEYFVENVERYSLFKEQRDIVEIIKTFPNYTKNGNLSLSLVRELNKLLMEGHDYESSLSSLNYYIDTDVDWEKFPTISEIEDSLSTKITNPNVKHILVILRKLYNTLLFKYGRPEKVHLELSRDFSNDFSTRNKIQKEQLENKVRREVAAFEMYGANKDIVAGKDRLSNDDFVRIKLWEEQNKVCMYSGRTIEKYQLTSAEVQIDHILPYSKSFDNSYSNKVLVFSNENQDKKERTPYQWLKGTEKWNEFKQRVRLNLNISNKKKENLLFEDEVVNNEFLERELHATSYSSRLALNIFQRLIPVSDEDKYDEHGNEKVKYLYNRNVIAFQGKMTSMLRNLYSLNKYTHSFESDTLDIDNKAFILKEFEINKDNLKMTAYNVNTGLEITSETKVEKNKSGEFKTIKDELLKKELDKKENLIEISDYFKDKVLFDLKIVDFEEIDTVEPEIISILYKMITALKEEVYSKNRENHLHHSLDAFLLTIMNRSMQMKLIKYNQLISVLKNKEIEIFNEEKGEYIDSKEFAEELQKQKIIDIDGNERGIKFNVNGKTHRLNLVKPYENFLDDIKNKIFDKRENNKLPYHVVKSKVSGALHAETILGESKGEITKRISVFDINYKNLGKIFDKDGSQKEIYETLVKWLEAKSKDYPKLKNGNIIKKVKIVDGNKDKLIKLGNKRYVEMGRTTVKILVLKKEAEEGLKFASIGRYKYNLLKSEKDVNISIWKDAIHFCKVRYNKLKENGYRLIHELIPGETIELELNKGNISKCLVVGFSGGKIEISSVIGDALDLINDKISTRIKERYYITVSTIKSIKKINKNILGD

SEQ ID NO: 128 - protein, 1091 aa, Mobiluncus mulieris
MDSRKYRVGIDVGTNSVGFAAVEEDDSGSPTRFLNTMVVIHDSGVDPEQKKYAITRLASAGTARRTRRLYRTRRQRLRELDDFISNELGYPLVNLENFADPYEPWKVRADLATTKLPNDELPEAMSIALRHMARHRGWRSPYQRVEALHLHAEISKEFAALKERVVEKTGDVFSDDATPAEVLVDLMGRQKVRGADGVLSGKLRQSDNANELRKIASVQGIDDETLNRIIDRVFSSKSPKGKASERVGMDALPGQGSKPRALKAMPSFQKFRVVSVICNLRIKDSGGDARPLSMEEKEKLIDYLMSSTTDDHVTWTDVADLLHVKRSQLQGTAKEGFDGERPYTRPPVNSTWSKIKDSKIKSLVALWKTGDVDVQSAIVEALSNASVLEDSRPGADIVVAYLESLDDKELESLDKVGLPAGRASYSEDSLERLTERMLRDDCDLFEARKREFNVADDWKPPADPIYAPVGNPGVDRVLKIVNRLLMAAEREWGAPTQINIEHVRSGFSSELMQREFERENERRRAQNEEAVKAILTEKGGNSRVSKYDITRYYAVKRQHCQCLYCGTPITFSDCELDHIVPRKGVGSTNTRVNLAAACRSCNRDKSNLPFAVWAGKASNFDVSIDDAVSRVKQWQRSQNEGVREFRAFQNEVISRLLKTTEDPEIDSRSLESVAWMARELHHRVEYYFQSKGAQTQVSVYRGAVTAQARKSSGLEDKVKMIGGGGKTRLDRRHHAMDAATIALMTPGISTTLSEKNNLRDAQKFTGQSETWKDYCGRTETARKHFAVWKSNMERLTDLFNDKLENDAIPVVQPLRLRLSNSKAHDDGIGKLDSKKLGSVWSLADIDRAATPQIWTALTRCDDFDPTKGLPENANRVIRAQGVKYESEDNIPVFPSNVAAIAVRDGYAEIGSTIHHARIYRIDDGKKTFYSMIRVFAVDLLKHQAEDLFTVKLPPSAISIRTCEDSLRRALSNGTAEYLGWLVPGDEIIVDTSDKAFHTGQIGDLLRNFPVNSFRLTGFPSNSRLRLKPVLLAGEGLRDDAEDSIKKILLGQGWRPAINVLFSKGKPRIVRRNSLGIERPSSNNGLPFSWEA

SEQ ID NO: 129 - protein, 872 aa, Unknown
  Candidatus Parvarchaeum
MLGSSRYLRYNLTSFEGKEPFLIMGYYKEYNKELSSKAQKEFNDQISEFNSYYKLGIDLGDKTGIAIVKGNKIILAKTLIDLHSQKLDKRREARRNRRTRLSRKKRLARLRSWVMRQKVGNQRLPDPYKIMHDNKYWSIYNKSNSANKKNWIDLLIHSNSLSADDFVRGLTIIFRKRGYLAFKYLSRLSDKEFEKYIDNLKPPISKYEYDEDLEELSSRVENGEIEEKKFEGLKNKLDKIDKESKDFQVKQREEVKKELEDLVDLFAKSVDNKIDKARWKRELNNLLDKKVRKIRFDNRFILKCKIKGCNKNTPKKEKVRDFELKMVLNNARSDYQISDEDLNSFRNEVINIFQKKENLKKGELKGVTIEDLRKQLNKTFNKAKIKKGIREQIRSIVFEKISGRSKFCKEHLKEFSEKPAPSDRINYGVNSAREQHDFRVLNFIDKKIFKDKLIDPSKLRYITIESPEPETEKLEKGQISEKSFETLKEKLAKETGGIDIYTGEKLKKDFEIEHIFPRARMGPSIRENEVASNLETNKEKADRTPWEWFGQDEKRWSEFEKRVTSLYSKKKISERKREILLNKSNEYPGLNPTELSRIPSTLSDFVESIRKMFVKYGYEEPQTLVQKGKPIIQVVRGRDTQALRWRWHALDSNIIPEKDRKSSFNHAEDAVIAACMPPYYLRQKIFREEAKIKRKVSNKEKEVTRPDMPTKKIAPNWSEFMKTRNEPVIEVIGKVKPSWKNSIMDQTFYKYLLKPFKDNLIKIPNVKNTYKWIGVNGQTDSLSLPSKVLSISNKKVDSSTVLLVHDKKGGKRNWVPKSIGGLLVYITPKDGPKRIVQVKPATQGLLIYRNEDGRVDAVREFINPVIEMYNNG

SEQ ID NO: 130 - protein, 1229 aa, Pediococcus acidilactici
MGDRKYNLGLDIGTSSIGFAAVDENNQPIRVKGKTAIGVRLFEEGKTAADRRGFRTTRRRLSRRRWRINLLNEIFDAHLAEVDPTFLARLKESNRSNLDPKKSFQGSLLFPERKDYQFYEEYPTIYHLRKALMEKDRKFDIREIYLAVHHIIKYRGNFLNGTPMRSFKVENIELNTLFDQLNQLYAEIVPDNELAFDLAQVADVKDVLSSTTIYKMDKKKQLVKMMLLPASNKALQSENKKIVTQFVNAILNYKFKLDVLLQVETDADWSLKLNDEGADDKLEEFTGDLDENRLEIIDLLQRLHNWFSLNEITKDGNSLSAAMVEKYENHHHHLGLLKKVIENHPDAKKAKALKETYTAYVGKTDDKTQNQDDFYKAVEKNLDDSPDAKGIKRLIQLDQFMPKQRTGQNGAIPHQLHQQELDQIIEKQSKYYPFLAEPNPNVKRRKDAPYKLDELIAFKIPYYVGPLVTPEEQAQNKENVFAWMKRKAAGPITPWNFDEKVDRMESANRFIRRMTTKDTYLFGEDVLPAESMIYQKFVVLNELNNLKINGRHLSLKDKQDVYNDLFKQQKTVSIKALQNYYVTKKKAATAPTVGGLADPKKFLSSLSTYIDFKNMFGERVNDPQFQEDLEQIVEWSTIFEDRGIFKAKLQALGWLSEKQIQQLVAKRYKGWGRLSKKLLTGLKNAEGYSILDEMWRSTENFMQIQSRPEFAALIQQANEKQFEGNDPDNVWENIENILGDAYTSPQNKKAIRQVVKVVQDIEKAVGNPPEKIAIEFTREAAANPQRTQSRLRTLEKLYESAEEVVDAGLTAELAEFKENKHVLSDKYYLYFTQLGRDVYTGDTISLDKLNDYDVDHILPQSFIKDDSLDNRVLTIRAVNNGKSDNVPAKMFGKKMGSFWRHLLDNGMISKRKYNNLITDPDNISKYAQKGFINRQLVETSQVIKLTANILNGIYDKDTEIIEVPAKMNSQMRKMFDLVKVREVNDYHHAFDAYLTIFIGNYLYKCYPKLRPYFVYDNFKKFGNKEDIGHKRFNFLGKIEREKKVVAPETGEILWSNVAPNETIKQIKKVYNYKFMIVSREITTRRAELFNQTVYPKNYRGKLIPIKEDRPTDLYGGYSGNTDAYLAIVALEDKKKGKYFKVVGIPTRAAAKLEKLKQQDSQQYLQALHEVIAPQFTKSTKKGIKKTEFEIVLDKVHYRQLVQDGPVKMMLGSSTYKYNAKQLVLSEKAL

SEQ ID NO: 131 - protein, 1398 aa, Veillonella parvula
METQASNQLISSHLKGYPIKDYFVGLDIGTSSVGWAVTNKAYELLKFRSHKMWGSRLFDEGESAVARRGFRSMRRRLERRKLRLKLLEELFADAMAQVDPTFFMRLRESKYHYEDKTTGHSSKHILFIDKNYNDQDYFKEYPTVYHLRSELMKSGTDDIRKLFLAVHHILKYRGNFLYEGATFDSNASTLDDVIKQALENITFNCFDCNSAISSIGQILMEAGKTKSDKAKAIEHLVDTYIATDTVDTSSKTQKDQVKEDKKRLKAFANLVLGLNASLIDLFGSVEELEEDLKKLQITGDTYDDKRDELAKAWSDEIYIIDDCKSVYDAIILLSIKEPGLTISESKVKAFNKHKDDLAILKSLLKSDRSIYNTMFKVDEKGLHNYVHYIKQGRTEETSCNREDFYKYTKKIVEGLSDSKDKEYILSQIELQILLPLQRIKDNGVIPYQLHLEELKAILAKCGPKFPFLNEVADGFSVAEKLIKMLEFRIPYYVGPLNTHHNVDNGGFAWAVRKASGRVTPWNFDDKIDREKSAAAFIKNLTNKCTYLLGEDVLPKSSLLYSEFMLLNELNNVRIDGKPLEKVVKEHLIEAVFKQDHKKMTKNRIEQFLKDNGYISETHKHEITGLDGEIKNDLASYRDMVRILGDGFDRSMAEEIITDITIFGESKKMLRETLRKKFASCLDDEAIKKLTKLRYRDWGRLSQKLLNGIEGCDKAGDGTPETIIILMRNFSYNLMELLGDKFSFMERIQEINAKLTEGQIVNPHDIIDDLALSPAVKRAVWQALRIVDEVAHIKKALPARIFVEVTRSNKNEKKKKDSRQKRLSDLYAAIKKDDVLLNGLNNEIFGELKSSLAKYDDAALRSKKLYLYYTQMGRCAYTGEIIELSLLNTDNYDIDHIYPRSLTKDDSFDNLVLCKRTANAQKSDAYPISEEIQKTQKPFWTFLKQQGLISERKYERLTRITPLTADDLSGFIARQLVETNQSVKAATTLLRRLYPGVDVVFVKAENVTDFRHDNNFIKVRSLNHHHHAKDAYLNIVVGNVYHERFTRNFRAFFKKNGANRTYNLAKMFNYDVNCTNAKDGKAWDVKTSMDTVKKMMDSNDVRVTKRLLEQTGALADATIYKATVAGKAKDGAYIGMKTKSSVFADVSKYGGMTKIKNAYSIIVQYTGKKGEVIKEIVPLPIYLTNRNTTDQDLINYVASIIPQAKDISIIYGKLCINQLVKVNGFYYYLGGKTNSKFCIDNAIQVIVSNEWIPYLKVLEKFNNMRKDNKDLKANVVSTRALDNKHTIEVRIVEEKNIEFFDYLVSKLKMPIYQKMKGNKAAELSEKGYGLFKKMSLEEQSIHLIELLNLLTNQKTTFEVKPLGITASRSTVGSKISNQDEFKVINESITGLYSNEVTIV

SEQ ID NO: 132 - protein, 1485 aa, Prevotella bivia
MKNILGLDLGTNSIGWAKISIDDNGKYIKDSIKLGSRIIPMSQDVLSNFSKGVTLSQTSERTSFRGARRLRERTLLRRERLHRILHLLGFLPKHYEKAIGWDRNDNKTYGKFINHAEPKLAWCKDNNGKMRFLFMDSFHDMLSEFSEKHPELLANGKKIPLDWTIYYLRKKALYKAITKEELAWILLNFNQKRGYYQLRGEEDRDSEANKKEYLELKVIGVEATGEKKGNDIWYNIHLENGWIYRRSSKNPLNDWLGKVKSFIVTTDLDADGNPKKDKDGNIKRSFRAPSEGDWTLIKKRTESLLENSGQTVGQFIYNHILEEPSAKIRGNFIRTIERKYYKDELKAILEKQKEFHHELSSESLLTECAKELYKRNIAHQEVLLKKGIIHLLLNDILFYQRPLKIKKSLIDNCPYENYKYVDKKSGDIKVKSIKCIAKSNPFFQEFRLWQFVSNLRLYRKSDDKDVTSEHLVTTDDYANLFTYLNNRKDIKQSVLLKEYFKIKKVKTINGAEYPVRWNYIDDDNKTYPCNETRYDILHALSKTELKSEWLTPERTYRLWHLLYSIESKEETKKALNKLNLSDDFTEAFLTIKPFKKEYGSYSEKAIKKLLSLMRMGYLWSEDEAIKQVGAEIEKTIEGELPDYVLQRLEKSQHNYNKISDFSGLPLWLASYIIYGRHSEAKEIIHWDNPESMMAYIKDFRQHSMRNPIVEQCVLETLRTVHDIWKEIGHIDEIHIELGREMKSTSEQRKAITQNVLHNQNTNIRIKLLLQELKNDNNITGVRPYSPMQQEILRIYEEGALQGLTKEDKDYNDILKISQTAQPTSNELTRYKLWLEQKYRSPYTGKAISLSKLFTSAYQIEHVIPQSRYFDDSLSNKVICESEVNTLKKAMLGMEFIKTCGGQKVHCTLLGDVEIYNEEDYKAFVNEHYSNNRTKRNKLLMEDIPQEFINRQLNDSRYISKMVKQLLSAIVRGQEEVEATSKFVIPCTGGITDRLKKDWGLNDIWNNLVSPRFQRMNALTGSEYFGHWENKEGKRVFQTTMPIQLQQGFSKKRIDHRHHAMDALVIACASRNIISYLNNETAQDTERRRDLRQKLCDKGGSVRKPWDSFTQDTQYALKDIIVTFKNYVRIINKATNYYEHYKTDGKKGMISQKGDELWAIRKPMHKETVFGKVNLRRPKRVSLSKAIDSVDIICNRKLKKYIKARLNEGLQKKQILNIFKELNNVWEGIDVNKIDIWEMSNDKEPMVATRKQLDTSFDEKKIRSISDTGIQKILLNYLITKNNNPELAFTPEGIQEMNSNISEYNDHKKHQPIYKVRVTEPLGAKYPIGTMGNNPKKFVEAQAGTNLYFAIYEDKEGKRNYDTIPLNIAAERLNQQLSPVPETNENNTPLKFYLSPNDLVYVPSEEERHSGNNIQLDKNRIYKMVSSTSKRCFFIHHRVAISLVDKKEFSAQNKMERSIDNEQVMIKSVCWKLITDRLGNIIKVIK

SEQ ID NO: 133 - protein, 1218 aa, Prevotella buccalis
MNKRILGLDTGTNSLGWAVVDWDEHAQSYELIKYGDVIFQEGVKIEKGIESSKAAERSGYKAIRKQYFRRRLRKIQVLKVLVKYHLCPYLSDDDLRQWHLQKQYPKSDELMLWQRTSDEEGKNPYYDRHRCLHEKLDLTVEADRYTLGRALYHLTQRRGFLSNRLDTSADNKEDGVVKSGISQLSTEMEEAGCEYLGDYFYKLYHEQGNKVRIRQRYTDRKKHYQHEFDAICEKQELSSELIEDLQRAIFFQLPLKSQRHGVGRCTFERGKPRCADSHPDYEEFRMLCFVNNIQVKGPHDLELRPLTYEEREKIEHLFFRKSKPNFDFEDIAKELAGKKNYAWIHDKEERAYKFNYRMTQGVPGCPTTAQLKSIFGDDWKTGIAETYTLIQKKNGSKSLQEMVDDVWNVLYSFSSVEKLKEFAHHKLQLDEENAEKFAKIKLSHSFAALSLKAIRKFLPFLRKGMYYTHASFFANIPTIVGKEIWNNEQSRKYIMENVGELVFNYQPKHRDVQGTIEMLIKDFLANNFELPAGATDKLYHPSMIETYPHALRNEFGILQLGSPRTNAIRNPMAMRSLHVLRRVVNQLLKESIIDENTEVHVEYARELNDANKRRAIADRQKEQDKQHKKYGDEIRKLYKEETGKDIEPTQTDVLKFQLWEEQNHYCLYTGEQIGITDFIGSNPKFDIEHTIPQSVGGDSTQMNLTLCDNRFNREVKKAKLPTELANHEEILTRIEPWKNKYEQLVKERDKQRTFAGMDKAVKDIRIQKRHKLQMEIDYWRGKYERFTMTEVPEGFSRRQGTGIGLISRYAGLYLKSLFHQADSRNKSNVYVVKGVATAEFRKMWGLQSEYEKKCRDNHSHHCMDAITIACIGKREYDLMAEYYHMEETFRQGRGSKPKFSKPWATFTEDVLNIYKNLLVVHDTPNNMPKHTKKYVQTSKGKVLAQGDTARGSLHLDTYYGAIERDGEIRYVVRRPLSSFTNPKELENIVDETVKRTIKEAIADKNFKQAIAEPIYMNEDKGILIKKVRCFANSVKQPINIRQHRDLSKKEYKQQYHVMNENNYLLAIYEGLVKNKVVREFEIVSYIEAAKYYKRSQDRNIFSSIVPTHSTKYGLPLKTKLLMGQQVLMFEENPDEIQVDNTKDLVKRLYKVVGIEKDGRIKFKHHQEARKEGLTIYSTPYKNNDDYVPIFRQSIKNINILVDGIDFNIDILGKVTLKE

SEQ ID NO: 134 - protein, 1218 aa, Prevotella timonensis
MNKRILGLDTGTNSLGWAVVDWDEHAQSYELIKYGDVIFQEGVKIEKGIESSKAAERSGYKAIRKQYFRRRLRKIQVLKVLVKYHLCPYLSDDDLRQWHLQKQYPKSDELMLWQRTSDEEGKNPYYDRHRCLHEKLDLTVEADRYTLGRALYHLTQRRGFLSNRLDTSADNKEDGVVKSGISQLSTEMEEAGCEYLGDYFYKLYDAQGNKVRIRQRYTDRNKHYQHEFDAICEKQELSSELIEDLQRAIFFQLPLKSQRHGVGRCTFERGKPRCADSHPDYEEFRMLCFVNNIQVKGPHDLELRPLTYEEREKIEPLFFRKSKPNFDFEDIAKALAGKKNYAWIHDKEERAYKFNYRMTQGVPGCPTIAQLKSIFGDDWKTGIAETYTLIQKKNGSKSLQEMVDDVWNVLYSFSSVEKLKEFAHHKLQLDEESAEKFAKIKLSHSFAALSLKAIRKFLPFLRKGMYYTHASFFANIPTIVGKEIWNKEQNRKYIMENVGELVFNYQPKHREVQGTIEMLIKDFLANNFELPAGATDKLYHPSMIETYPNAQRNEFGILQLGSPRTNAIRNPMAMRSLHILRRVVNQLLKESIIDENTEVHVEYARELNDANKRRAIADRQKEQDKQHKKYGDEIRKLYKEETGKDIEPTQTDVLKFQLWEEQNHHCLYTGEQIGITDFIGSNPKFDIEHTIPQSVGGDSTQMNLTLCDNRFNREVKKAKLPTELANHEEILTRIEPWKNKYEQLVKERDKQRTFAGMDKAVKDIRIQKRHKLQMEIDYWRGKYERFTMTEVPEGFSRRQGTGIGLISRYAGLYLKSLFHQADSRNKSNVYVVKGVATAEFRKMWGLQSEYEKKCRDNHSHHCMDAITIACIGKREYDLMAEYYRMEETFKQGRGSKPKFSKPWATFTEDVLNIYKNLLVVHDTPNNMPKHTKKYVQTSIGKVLAQGDTARGSLHLDTYYGAIERDGEIRYVVRRPLSSFTKPEELENIVDETVKRTIKEAIADKNFKQAIAEPIYMNEEKGILIKKVRCFAKSVKQPINIRQHRDLSKKEYKQQYHVMNENNYLLAIYEGLVKNKVVREFEIVSYIEAAKYYKRSQDRNIFSSIVPTHSTKYGLPLKTKLLMGQLVLMFEENPDEIQVDNTKDLVKRLYKVVGIEKDGRIKFKYHQEARKEGLPIFSTPYKNNDDYAPIFRQSINNINILVDGIDFTIDILGKVTLKE

SEQ ID NO: 135 - protein, 1487 aa, Prevotella timonensis
MKNILGLDLGSNSVGWALVKVEENGNPIGSIKMGSRIIPMSQDILGSFEKGDTVSQTAQRTLYRGKRRLIERHVLRRERLCRVLHIMNFLPAHFDRLLGWDKTDNKTYGKFIDDSEPKLAWRQNKNEMGKMEFVFMDSFHEMLSDFAKHQPQLIANGKKVPLDWTIYYLRKKALTQLISKEELAWILLNFNKKRGYYQLRGEEEEEQPTKKEEYKVLKVISVDADEGQKGNGIWYNIHLEDGGIYKKKSDIPLYDWVGKTLQLIVVTTYEKDGKTPKIFDSGKQNPSYRLPKEDDWGLVKKRTESQLQSSGKTVGAFIYDNILSKPDDKIRGNLVRTIERKYYKKELIEILQQQAKYHDELHNQNLLESCAKELYAHNDVHYNEVIKSNMINLLVNDIIFYQRPLKSKKSLIANCKYESYEYVDKETGEIKEMPIKCIAKSNPYYQEFRLWQFIHNLRLSDVVTREDVTAQYLSTPQDYCNLFTYLNDRKEIKQDILLKDFFKIKKVQIDKEKVFPIEWNYIKDATKSYPCNETRYELLSALKRAGMDKQWLDDTPNMQYRLWHLLYSVEEKEESAKALRKLYDDDKFVTSFLKIKPFNKCYGAYSEKAIKRLLTLMRMGKAWNEQAIDAKTLKCIQQIITDNVDSKLKEKIDDSRYVLHHVSDFQGLPTYLASYVIYGRHSEVTDIQCWDSPEDLLKFIRDFKQHSLRNPIVEQVILETLRVVYDIWKAEKHIDEIHVEVAREMKLTAQQRNEANLRNLNNEATNLRIKYLLEELKNDTFIKDVRPLSPIHQEKMRIYEQAVLGNLNKQDKDYDDIIKISKKEHPTNAELIRYKLWLEQRYCSPYTGKAISLSKLFTTAYEIEHIIPQSRYFDNSFNNKVICEAEVNKAKGNMLGYEFIKKQGGQKIYCTQLGKAVTILKEEAYKQFVNEHYAHNKRKRDNLLAENIPESFSSRQLNDTRYITKTIMSLLSNVVRQQSEEEATAKNLLPSSGSVTDRLKNDWGLKDVWNTIVTPRFERLNKLSGTNDFGEMKEENGNRYFQTNVPLEYEKGFKKKRIDHRHHAMDALVIACTTRNMVNYISNANANSPKQREDLRQLLCDKNRIINKPWDTFTQDALKALNDIVVSFKNNVRIINRATNRYQRYDKNGKKIIFSQKGDDMWAIRKSMHKETVFGRVNLIRKEVLPIAKALDNISAICNAQLRAYVNDLVDKHFNKKQLVAHFKSLNYKWNRQDVSKVEVWISSDNKTPMVAVRKPLDTSFDKKKIASITDTGIQTILLNYLESKGGDASVAFAPEGIQEMNSNIELYNNGKAHKPIKNVRLSEPLGAKYQVGERGAKTKKYVEADKGTNLFFAIYEDEEGKRYYYSVPLREAIERQKQKLSPVPEYNEKGVALKFYLSPNDLVYVPTEEERTMGTCHIDKARIYKMVSSTGCSCYFVPSTFAKVIVDKVELQSLNKMEKAITDECIKEVCWKLKVDRLGNIINVIK

SEQ ID NO: 136 - protein, 1138 aa, Bifidobacterium dentium
MLCRCHRRYRIGIDVGLMSVGLAAIEVDETGFPIRILNIQSVIHDGGIDPQLGKKKSISRKAISGVARRTRRMRRRKVVRLRQLDATLESLGFPIVEPDSLDTWEIWLTRAKLASSYIQDDETRKEDVSIALRHIARHRGWRNPYSNVESLFVDVAPSEQYEELRRKAEEKLGTSLSGNPTSAEIVECILKRQVGEVQLRTRSRKGVNGNAVEKEGLLPTKLMQSDNAAEIRRIFKVQRIDDETGRKLLRAVFKACSPKGSVERRVGRDALAPGLPRALKASLAFQEYRIANVLTNLVISEDGTKRKLTIAEKQRVFGFLSSNETDDITWIDVAEKLGLERRQIQGVGCLTADGEERISSTPPRNITALHIHSAKPVIREKLVAWWKAASPTVRETMVELLSNTVDIDRVREDMDYSSAVAFIDSLGDEELTALDSVDLLSGRAAYSRQTLKQLTERMLNTDDDLHEARKAVFGVDDNWKPPVDAISTSVGNPAVDRVLKIVNRYLLACQKRWRNPQSVQIEHVRESFSSVAKAKETERVQGERARYRNDLRRELCEQEGLNKIRESDIRRWESVQRQNGTCLYCGSPITFRTCEMDHIVPRKGVGSTNTRVNLAAACAACNKLKSNTAFSVWARTEGAANRKVSQRDAIERVKTFIFNKSVPPREQRAFKQAVISRLRQAESDPAIDNRSIESVAWMADELHRRIEAYFNQDADVSGNTPATQVWVFQGRVTALARKASGIEGRIHFAGEWKKTRLDRRHHAVDAAVIAMMNHSAAQTLVERDSLRLSQWITRKPETWKNYPFSEGQKKTRFKEWLDCMNALLDLLNDALDSDRVPVTRCQRMSLGNSQAHAATIRKMKRVELFSPMDADLIRRASTPALYCALTRLPEYSPEKGLPENRGREIVLNGRHIRSTETVDFFASGAAQLMVRNGSAEIGDSIHHMRIYRYRKTGAKSQEYVYGMIRVFQIDLLHASSENLFAVQLPSQSVSVRYGDKNVVQAIQEGRAEYLGHIVPNDEILISYEGVRMKDSEKIGAYANDFSGTASELAQRRHWVVVGSDVSKLALRPSYLSEEGLENSGSESERLSKQTRKVIEGKGWVVAVNILAKYHPVVIRRNALGEPRFRTNSGMPVSWRWDR

SEQ ID NO: 137 - protein, 587 aa, Neisseria subflava
MATSRSRIRSQTDAFGVVGSLVAFNQTSRLFVAKKNEGETADKELGALLKGVADNAHALQTGNFRTPAELALNKFEKESGHIRNQRGDYSHTFNRKDLQAELNLLFEKQKEFGNPHVSDGLKEGIETLLMAQRPALSGDAVQKMLGYCTFEPTEPKAAKNTYTAGRFIWLTKLNNLRILEQGSERPLTTTERATLMDEPYRKSKLTYAQARKLLGLEDTAFFKGLRYGKDNAEASTLMEMKAYHAISRALEKEGLKDKKSPLNLSPELQDEIGTAFSLFKTDEDITGRLKDRVQPEILEALLKHISFDKFVQISLKALRRIVPLMEQGKRYDEACAEIYGDHYGKKNAEEKIYLPPIPADEIRNPVVLRALSQARKVINAVVRRYGSPARIHIETAREVGKSFKDRKEIEKRQEENRKDREKAAAKFREYFPNFVGEPKSKDILKLRLYEQQHGKCLYSGKEINLGRLNEKGYIEIDHALPFSRTWDDSFNNKVLVLGSENQNKGNQTPYEYFNGKDNSREWQEFKARVETSRFPRSKKQRILLQKFDEDGIYRIGVKTALSFPKYQIDELGKEIRPCRLKKRPPVR

SEQ ID NO: 138 - protein, 1269 aa, Mycoplasma gallisepticum
MNNSIKSKPEVTIGLDLGVGSVGWAIVDNETNIIHHLGSRLFSQAKTAEDRRSFRGVRRLIRRRKYKLKRFVNLIWKYNSYFGFKNKEDILNNYQEQQKLHNTVLNLKSEALNAKIDPKALSWILHDYLKNRGHFYEDNRDFNVYPTKELAKYFDKYGYYKGIIDSKEDNDNKLEEELTKYKFSNKHWLEEVKKVLSNQTGLPEKFKEEYESLFSYVRNYSEGPGSINSVSPYGIYHLDEKEGKVVQKYNNIWDKTIGKCNIFPDEYRAPKNSPIAMIFNEINELSTIRSYSIYLTGWFINQEFKKAYLNKLLDLLIKTNGEKPIDARQFKKLREETIAESIGKETLKDVENEEKLEKEDHKWKLKGLKLNTNGKIQYNDLSSLAKFVHKLKQHLKLDFLLEDQYATLDKINFLQSLFVYLGKHLRYSNRVDSANLKEFSDSNKLFERILQKQKDGLFKLFEQTDKDDEKILAQTHSLSTKAMLLAITRMTNLDNDEDNQKNNDKGWNFEAIKNFDQKFIDITKKNNNLSLKQNKRYLDDRFINDAILSPGVKRILREATKVFNAILKQFSEEYDVTKVVIELARELSEEKELENTKNYKKLIKKNGDKISEGLKALGISEDEIKDILKSPTKSYKFLLWLQQDHIDPYSLKEIAFDDIFTKTEKFEIDHIIPYSISFDDSSSNKLLVLAESNQAKSNQTPYEFISSGNAGIKWEDYEAYCRKFKDGDSSLLDSTQRSKKFAKMMKTDTSSKYDIGFLARNLNDTRYATIVFRDALEDYANNHLVEDKPMFKVVCINGSVTSFLRKNFDDSSYAKKDRDKNIHHAVDASIISIFSNETKTLFNQLTQFADYKLFKNTDGSWKKIDPKTGVVTEVTDENWKQIRVRNQVSEIAKVIEKYIQDSNIERKARYSRKIENKTNISLFNDTVYSAKKVGYEDQIKRKNLKTLDIHESAKENKNSKVKRQFVYRKLVNVSLLNNDKLADLFAEKEDILMYRANPWVINLAEQIFNEYTENKKIKSQNVFEKYMLDLTKEFPEKFSEFLVKSMLRNKTAIIYDDKKNIVHRIKRLKMLSSELKENKLSNVIIRSKNQSGTKLSYQDTINSLALMIMRSIDPTAKKQYIRVPLNTLNLHLGDHDFDLHNMDAYLKKPKFVKYLKANEIGDEYKPWRVLTSGTLLIHKKDKKLMYISSFQNLNDVIEIKNLIETEYKENDDSDSKKKKKANRFLMTLSTILNDYILLDAKDNFDILGLSKNRIDEILNSKLGLDKIVK

SEQ ID NO: 139 - protein, 1354 aa, Prevotella melaninogenica
MADFAKYQPGMVADGRKIPLDWTLYYLRKKALTQAIRKEELAWILLNFNQKRGYYQLRGEEEEENSTKHEEYYELKVVSVEAAEEGKGGNTWYNVTLENGWIYRRQSKIELNDWVGKVRPFIVTTEYEIDGVTIKKDKNGEVKRSFRAPSENDWGLRKKRTESLLEESGKTVGAFIYNHILSEPADKIRGNFIRTIERKFYKKELEAILREQSKHQKELKDIDTLIACIKELYPNNKPHQDSLIKKDMTYLLITDLIFYQRPLKSKKSLIADCPYEYYEYVIKETGENKRQSIKCIAKSNPYYQEFRLWQFIINLRLFDRNNDKEVTSEYLSSMEDYTRLFTYLNDRKDINQETLLKDFFKQKKVKRGMEKEFPIRWNYIEDKEKKYPCNETRHELLTALGKVGIDHSWLDDKELFYRLWHLLYSVESKEEAEGALRKLVDNDDFVNAFLKIKPFKKEYGAYSEKAIKKLLAVMRMGNLWNEVDICEQTRDRIQNIIKGDIDEKIKDRMGRTFSQLSDFQGLPEWLACYVVYGQHSEATDIQRWTKPENLMAYINGFKQHSLRNPIVEQCILETLRTVHDIWKEAGHIDEIHIELGRGMKSTADQRARMSKSIMQNENTNLRIKSLLMELKNAKEFENVRPYSPMQQEILRIYEEGALQELTKEDAQYNEISKISQMAQPSANELLKYRLWLEQKYCSPYTGKPISLSKLFTSAYQIEHIIPQSRYFDDSFTNKVICEAEVNQLKSNMLGYEFIKKHGGEIVRCTMIGDVKLLDAKEYYNFVTEHYTNNRRKKEKLLMEDIPQEFLNRQMNDSRYISKKVMAILSNIVREEDEQEAKSKFVIACSGGITDRLKQDWGLNDVWNSIVYPRFERLNKLTNTENFGRWENKKGKQVFQTSVPLELQKDFSKKRIDHRHHAMDALVIACASNNIINYLNNESAKSQEKREDLRKKLCDKNRIIRKPWETFTQDAHTALENVVVSFKNYIRVINKATNYYEKYDKNGKKEIAEQKGQDMWAIRKPMHKETVFGQVNLRRKITIKLKDALEKIPAICDKELRDYINILVAKQFNKKQILAHFKSINYRLNMKSVDKVDVWQFSNEKEPMVATRKSVDTSFDTKRIATITDTGIQKILLNYLKAKNNDPNIAFTPEGIAEMNKHITEYNNGKQHQPILKVRVSEPKGAKYQVGETGNKRSKFVEAQKGTNLYFAIYEDKEGNRSYNTIPLNEVIERLKQGLSPVPDANEKSIPLKFHLSPNDLVYVPKTDEENEIKMGQIYKFVDSSGTTANFVPHRVSNLIYNVDKKIAENFCNHEIIQNEYGIGSPQSKNQKSITGEMIKAVCWKLEVDRLGNIHKIIK

SEQ ID NO: 140 - protein, 1130 aa, Streptococcus gallolyticus
MTNGKILGLDIGIASVGVGIIEAKTGKVVHANSRLFSAANAENNAERRGFRGSRRLNRRKKHRVKRVRDLFEKYEIVTDFRNLNLNPYELRVKGLTEQLTNEELFAALRTISKRRGISYLDDAEDDSTGSTDYAKSIDENRRLLKTKTPGQIQLERLEKYGQLRGNFTVYDENGEAHRLINVFSTSDYEKEARKILETQADYNKKITAEFIDDYVEILTQKRKYYHGPGNEKSRTDYGRFRTDGTTLENIFGILIGKCSFYPDEYRASKASYTAQEYNFLNDLNNLKVPTETGKLSTEQKEALVEFAKSTATLGPAKLLKEIAKILDCKVDEIKGYREDDKGKPDLHTFEPYRKLKFNLDSVNIDDLSREVLDKLADILTLNTEREGIEDAIRHNLPNQFTEGQISEIIKVRKSQSTAFNKGWHSFSAKLMNELIPELYATSDEQMTILTRLEKFKVNKKSSKNTKTIDEKEVTDEIYNPVVAKSVRQTIKIINAAVKKYGDFDKIVIEMPRDKNADDEKKFIDKRNKENKKEKDDALKRAAYLYNGTDKLPDEVFHGNKQLETKIRLWYQQGERCLYSGKPIPIQELVHNSNNFEIDHILPLSLSFDDSLANKVLVYAWTNQEKGQKTPYQVIDSMDAAWSFREMKDYVLKQKGLGKKKRDYLLTTENIDKIEVKKKFIERNLVDTRYASRVVLNSLQSALRELGKDTKISVIRGQFTSQLRRKWKIDKSRETYHHHAVDALIIAASSQLKLWEKQDNPMFVDYGNNQVVDKQTGEILSVSDDEYKELVFQPPYQGFVNMISSKGFEDEILFSYQVDSKYNRKVSDATIYSTRKAKIGKDKKEETYVLGKIKDIYSQNGFDTFIKKYNKDKTQFLMYQKDPLTWENVIEVILRDYPTTKKSEDGKNDVKCNPFEEYRRENGLVCKYSKKGKGTPIKSLKYYDKKLGNCIDITPEGSKNEVVLQSLNPWRADVYFNPETLKYELLGLKYSDLSFEKGTGKYHISQEKYDVIKEKEGIGKKSEFKFTLYRNDLILIKDTASGEQEIYRFLSRTMPNVKHYAELKPYDKEKFDNVQELVEALGEADKVGRCIKGLNKSNLSIYKVRTDVLGNKYFVKKEGDKPKLDFKNNKK

SEQ ID NO: 141 - protein, 1371 aa, Streptococcus gallolyticus
MTEKNYSIGLDIGTNSVGWAVITDDYKVPAKKMKVLGNTDKKYIKKNLLGALLFDNGETAEATRLKRTARRRYTRRKNRLRYLQEIFAEEMAKVDESFFYRLDESFLTTDDKDFERHPIFGNKADEIKYHQEFPTIYHLRKHLADSHEKADLRLIYLALAHMIKFRGHFLIEGELNAENTDVQKLFEAFVEVYDRTFDDSNLSEITVDASSILTEKFSKSRRLENLIKHYPTEKKNTLFGNLVALALGLQPNFKTSFKLSEDAKLQFSKDTYEEDLEELIGKIGDEYADLFTSAKNLYDAILLSGILTVADNTTKAPLSASMIKRYNEHQVDLKKLKEFIKNNASDKYDEIFNDKDKNGYAGYIENGVKQDEFYKYLKTTLSKIDGSDYFLDKIEREDFLRKQRTFDNGSIPHQIHLQEMHAILRRQGEHYAFLKENQAKIEKILTFRIPYYVGPLARKNSRFAWAEYHSDEKITPWNFDEIIDKEKSAEKFITRMTLNDLYLPEEKVLPKHSLVYETYTVYNELTKVKYVNEQGKSNFFDANMKQEIFEHVFKENRKVTKDKFLNYLNKEFPEYRIQDLIGLDKENKSFNASLGTYHDLKKILDKSFLDDKTNETIIEDIIQTLTLFEDRDMIRQRLQKYSDIFTPQQLKKLERRHYTGWGRLSYKLINGIRNKENGKSILDYLIDDGYANRNFMQLISDDTLPFKQIIKDAQIIGDIDDVTSVVRELPGSPAIKKGILQSVKIVDELVKVMGHNPDNIVIEMARENQTTNRGRNQSQQRLKKLQDSLKELGSNILNEEKPSYIEGKVENNHLQDDRLFLYYIQNGKDMYTGDELDIDHLSDYDIDHIIPQAFIKDDSIDNRVLTSSAKNRGKSDDVPSLDIVHDRKADWIRLYKSGLISKRKFDNLTKAERGGLTENDKAGFIKRQLVETRQITKHVAQILDSRFNTERDENDKVIRNVKVITLKSNLVSQFRKDFKFYKVREINDYHHAHDAYLNAVVGTALLKKYPKLAPEFVYGEYKKYDIRKFITSSGDKATAKYFFYSNLMNFFKRVIRYSNGKVVVRPVIECSKDTGEIAWNKQTDFEKVRRVLSYPQVNIVKKVETQTGGFSKESILPKGNSDKLIPRKTKKFRWDTPKYGGFDSPNIAYSVFVIADVEKGKAKKLKTVKELVGISIMERSSFEENPVVFLEKKGYQNVQEDNLIKLPKYSLFEFEGGRRRLLASASELQKGNEVVLSRHLVELLYHAHRVNSFNNSEHLKYVSEHKKEFGEVLSCVENFAKSYVDVEKNLGKIRAVADKIDTFSIEDISISFVNLLTLTALGAPADFNFLGEKIPRKRYTSTKECLNATLIHQSITGLYETRIDLSKLGEE

SEQ ID NO: 142 - protein, 1168 aa, Unknown
  Azospirillum sp.
MARPAFRAPRREHVNGWTPDPHRISKPFFILVSWHLLSRVVIDSSSGCFPGTSRDHTDKFAEWECAVQPYRLSFDLGTNSIGWGLLNLDRQGKPREIRALGSRIFSDGRDPQDKASLAVARRLARQMRRRRDRYLTRRTRLMGALVRFGLMPADPAARKRLEVAVDPYLARERATRERLEPFEIGRALFHLNQRRGYKPVRTATKPDEEAGKVKEAVERLEAAIAAAGAPTLGAWFAWRKTRGETLRARLAGKGKEAAYPFYPARRMLEAEFDTLWAEQARHHPDLLTAEAREILRHRIFHQRPLKPPPVGRCTLYPDDGRAPRALPSAQRLRLFQELASLRVIHLDLSERPLTPAERDRIVAFVQGRPPKAGRKPGKVQKSVPFEKLRGLLELPPGTGFSLESDKRPELLGDETGARIAPAFGPGWTALPLEEQDALVELLLTEAEPERAIAALTARWALDEATAAKLAGATLPDFHGRYGRRAVAELLPVLERETRGDPDGRVRPIRLDEAVKLLRGGKDHSDFSREGALLDALPYYGAVLERHVAFGTGNPADPEEKRVGRVANPTVHIALNQLRHLVNAILARHGRPEEIVIELARDLKRSAEDRRREDKRQADNQKRNEERKRLILSLGERPTPRNLLKLRLWEEQGPVENRRCPYSGETISMRMLLSEQVDIDHILPFSVSLDDSAANKVVCLREANRIKRNRSPWEAFGHDSERWAGILARAEALPKNKRWRFAPDALEKLEGEGGLRARHLNDTRHLSRLAVEYLRCVCPKVRVSPGRLTALLRRRWGIDAILAEADGPPPEVPAETLDPSPAEKNRADHRHHALDAVVIGCIDRSMVQRVQLAAASAEREAAAREDNIRRVLEGFKEEPWDGFRAELERRARTIVVSHRPEHGIGGALHKETAYGPVDPPEEGFNLVVRKPIDGLSKDEINSVRDPRLRRALIDRLAIRRRDANDPATALAKAAEDLAAQPASRGIRRVRVLKKESNPIRVEHGGNPSGPRSGGPFHKLLLAGEVHHVDVALRADGRRWVGHWVTLFEAHGGRGADGAAAPPRLGDGERFLMRLHKGDCLKLEHKGRVRVMQVVKLEPSSNSVVVVEPHQVKTDRSKHVKISCDQLRARGARRVTVDPLGRVRVHAPGARVGIGGDAGRTAMEPAEDIS

SEQ ID NO: 143 - protein, 1345 aa, Streptococcus mutans
MKKPYSIGLDIGTNSVGWAVVTDDYKVPAKKMKVLGNTDKSHIKKNLLGALLFDSGNTAADRRLKRTARRRYTRRRNRILYLQEIFAEEMSKVDDSFFHRLEDSFLVTEDKRGERHPIFGNLEEEVKYHENFPTIYHLRQYLADNPEKVDLRLVYLALAHIIKFRGHFLIEGKFDTRNNDVQRLFQEFLAVYDNTFENSSLQEQNVQVEEILTDKISKSAKKDRVLKLFPNEKSNGRFAEFLKLIVGNQADFKKHFELEEKAPLQFSKDTYEEELEVLLAQIGDNYAELFLSAKKLYDSILLSGILTVTDVSTKAPLSASMIQRYNEHQMDLAQLKQFIRQKLSDKYNEVFSDVSKDGYAGYIDGKTNQEAFYKYLKGLLNKIEGSGYFLDKIEREDFLRKQRTFDNGSIPHQIHLQEMRAIIRRQAEFYPFLADNQDRIEKILTFRIPYYVGPLARGKSDFAWLSRKSADKITPWNFDEIVDKESSAEAFINRMTNYDLYLPNQKVLPKHSLLYEKFTVYNELTKVKYKTEQGKTAFFDANMKQEIFDGVFKVYRKVTKDKLMDFLEKEFDEFRIVDLTGLDKENKAFNASYGTYHDLRKILDKDFLDNSKNEKILEDIVLTLTLFEDREMIRKRLENYSDLLTKEQVKKLERRHYTGWGRLSAELIHGIRNKESRKTILDYLIDDGNSNRNFMQLINDDALSFKEEIAKAQVIGETDNLNQVVSDIAGSPAIKKGILQSLKIVDELVKIMGHQPENIVVEMARENQFTNQGRRNSQQRLKGLTDSIKEFGSQILKEHPVKHSQLQNDRLFLYYLQNGRDMYTGEELDIDYLSQYDIDHIIPQAFIKDNSIDNRVLTSSKENRGKSDDVPSKNVVRKMKSYWSKLLSAKLITQRKFDNLTKAERGGLTDDDKAGFIKRQLVETRQITKHVARILDERFHTETDENNKKIRQVKIVTLKSNLVSNFRKEFELYKVREINDYHHAHDAYLNAVIGKALLGVYPQLEPEFVYGDYPHFHGHKENKATAKKFFYSNIMNFFKKDDVRTDKNGEIIWKKDEHISNIKKVLSYPQVNIVKKVEEQTGGFSKESILPKGNSDKLIPRKTKKFYWDTKKYGGFDSPIVAYSILVIADIEKGKSKKLKTVKALVGVTIMEKMTFERDPVAFLERKGYRNVQEENIIKLPKYSLFKLENGRKRLLASARELQKGNEIVLPNHLGTLLYHAKNIHKVDEPKHLDYVDKHKDEFKELLDVVSNFSKKYTLAEGNLEKIKELYAQNNGEDLKELASSFINLLTFTAIGAPATFKFFDKNIDRKRYTSTTEILNATLIHQSITGLYETRIDLSKLGGD

SEQ ID NO: 144 - protein, 1024 aa, Helicobacter mustelae
MIRTLGIDIGIASIGWAVIEGEYTDKGLENKEIVASGVRVFTKAENPKNKESLALPRTLARSARRRNARKKGRIQQVKHYLSKALGLDLECFVQGEKLATLFQTSKDFLSPWELRERALYRVLDKEELARVILHIAKRRGYDDITYGVEDNDSGKIKKAIAENSKRIKEEQCKTIGEMMYKLYFQKSLNVRNKKESYNRCVGRSELREELKTIFQIQQELKSPWVNEELIYKLLGNPDAQSKQEREGLIFYQRPLKGFGDKIGKCSHIKKGENSPYRACKHAPSAEEFVALTKSINFLKNLTNRHGLCFSQEDMCVYLGKILQEAQKNEKGLTYSKLKLLLDLPSDFEFLGLDYSGKNPEKAVFLSLPSTFKLNKITQDRKTQDKIANILGANKDWEAILKELESLQLSKEQIQTIKDAKLNFSKHINLSLEALYHLLPLMREGKRYDEGVEILQERGIFSKPQPKNRQLLPPLSELAKEESYFDIPNPVLRRALSEFRKVVNALLEKYGGFHYFHIELTRDVCKAKSARMQLEKINKKNKSENDAASQLLEVLGLPNTYNNRLKCKLWKQQEEYCLYSGEKITIDHLKDQRALQIDHAFPLSRSLDDSQSNKVLCLTSSNQEKSNKTPYEWLGSDEKKWDMYVGRVYSSNFSPSKKRKLTQKNFKERNEEDFLARNLVDTGYIGRVTKEYIKHSLSFLPLPDGKKEHIRIISGSMTSTMRSFWGVQEKNRDHHLHHAQDAIIIACIEPSMIQKYTTYLKDKETHRLKSHQKAQILREGDHKLSLRWPMSNFKDKIQESIQNIIPSHHVSHKVTGELHQETVRTKEFYYQAFGGEEGVKKALKFGKIREINQGIVDNGAMVRVDIFKSKDKGKFYAVPIYTYDFAIGKLPNKAIVQGKKNGIIKDWLEMDENYEFCFSLFKNDCIKIQTKEMQEAVLAIYKSTNSAKATIELEHLSKYALKNEDEEKMFTDTDKEKNKTMTRESCGIQGLKVFQKVKLSVLGEVLEHKPRNRQNIALKTTPKHV

SEQ ID NO: 145 - protein, 765 aa, Butyrivibrio fibrisolvens
MGITIGLDLGVASVGWAVVNDDYEILESCSNIFPSADASKNSERRGFRQGRRLTRRRKNRIHDFQKLWEDKGFVIPSQGTEDVLAIKIKGLSEKLSVDEVYWVLLNSLKHRGISYLDDADSGDNSSDYAKSISRNEEELKEKLPCEIQWERLQKYGAYRGNISIVEDGEPITLRNVFTTSAYKKEVEQFIDTQAKYNAQYSGDFKADYLEIFNRKREYYEGPGNELSRTDYGKYTTEINADGEYITVDNIFDKLVGKCSVNPDERRAAGASYTAQEFNVLNDLNNLTISSESSFIEDGKLTEDAKRKIIETIKNAKTVNVKKIICDVIGDKKCQISGARIDKNEKEIFHSFEAYNKMRRALEEIGFDISSLSRENLDLIGDILTLNTDRESILNAFNRKGIELADEAKDILVKVRKTNGSLFNKWQSFGLSIMNELIPELYAQPKNQMELLTAMGVFKSRGDRFLECKEIPGDLIVDDIYNPVVSKTVRITVRILNALIKKYGYPDRVVIEMPRDKNSDEEQQRLKKEQRDNENEIKDIKARVKTEYGREITEEDFRQHSKLSLKLKLWNEQQGICPYSGKSIKIDDLLDNPNLFEVDHIIPLSISFDDSRNNKVLVYSSENQDKGNRTPLAYLASVNRQWDIHSFMDYVLKTYAGAQKRKKRDNLLNEQDITKVEVLQGFVNRNINDTRYASKVVLNSLQEYFSSKECSTKVKVIRGSFTHQMRVNLKLKKTVMNHMFIMQLMQCLLLFHRWDMTLIMNLQISI

SEQ ID NO: 146 - protein, 1338 aa, Coprococcus catus
MKQEYFLGLDMGTGSLGWAVTDSTYQVMRKHGKALWGTRLFESASTAEERRMFRTARRRLDRRNWRIQVLQEIFSEEISKVDPGFFLRMKESKYYPEDKRDAEGNCPELPYALFVDDNYTDKNYHKDYPTIYHLRKMLMETTEIPDIRLVYLVLHHMMKHRGHFLLSGDISQIKEFKSTFEQLIQNIQDEELEWHISLDDAAIQFVEHVLKDRNLTRSTKKSRLIKQLNAKSACEKAILNLLSGGTVKLSDIFNNKELDESERPKVSFADSGYDDYIGIVEAELAEQYYIIASAKAVYDWSVLVEILGNSVSISEAKIKVYQKHQADLKTLKKIVRQYMTKEDYKRVFVDTEEKLNNYSAYIGMTKKNGKKVDLKSKQCTQADFYDFLKKNVIKVIDHKEITQEIESEIEKENFLPKQVTKDNGVIPYQVHDYELKKILDNLGTRMPFIKENAEKIQQLFEFRIPYYVGPLNRVDDGKDGKFTWSVRKSDARIYPWNFTEVIDVEASAEKFIRRMTNKCTYLVGEDVLPKDSLVYSKFMVLNELNNLRLNGEKISVELKQRIYEELFCKYRKVTRKKLERYLVIEGIAKKGVEITGIDGDFKASLTAYHDFKERLTDVQLSQRAKEAIVLNVVLFGDDKKLLKQRLSKMYPNLTTGQLKGICSLSYQGWGRLSKTFLEEITVPAPGTGEVWNIMTALWQTNDNLMQLLSRNYGFTNEVEEFNTLKKETDLSYKTVDELYVSPAVKRQIWQTLKVVKEIQKVMGNAPKRVFVEMAREKQEGKRSDSRKKQLVELYRACKNEERDWITELNAQSDQQLRSDKLFLYYIQKGRCMYSGETIQLDELWDNTKYDIDHIYPQSKTMDDSLNNRVLVKKNYNAIKSDTYPLSLDIQKKMMSFWKMLQQQGFITKEKYVRLVRSDELSADELAGFIERQIVETRQSTKAVATILKEALPDTEIVYVKAGNVSNFRQTYELLKVREMNDLHHAKDAYLNIVVGNAYFVKFTKNAAWFIRNNPGRSYNLKRMFEFDIERSGEIAWKAGNKGSIVTVKKVMQKNNILVTRKAYEVKGGLFDQQIMKKGKGQVPIKGNDERLADIEKYGGYNKAAGTYFMLVKSLDKKGKEIRTIEFVPLYLKNQIEINHESAIQYLAQERGLNSPEILLSKIKIDTLFKVDGFKMWLSGRTGNQLIFKGANQLILSHQEAAILKGVVKYVNRKNENKDAKLSERDGMTEEKLLQLYDTFLDKLSNTVYSIRLSAQIKTLTEKRAKFIGLSNEDQCIVLNEILHMFQCQSGSANLKLIGGPGSAGILVMNNNITACKQISVINQSPTGIYEKEIDLIKL

SEQ ID NO: 147 - protein, 1035 aa, Candidatus Puniceispirillum
MRRLGLDLGTNSIGWCLLDLGDDGEPVSIFRTGARIFSDGRDPKSLGSLKATRREARLTRRRRDRFIQRQKNLINALVKYGLMPADEIQRQALAYKDPYPIRKKALDEAIDPYEMGRAIFHINQRRGFKSNRKSADNEAGVVKQSIADLEMKLGEAGARTIGEFLADRQATNDTVRARRLSGTNALYEFYPDRYMLEQEFDTLWAKQAAFNPSLYIEAARERLKEIVFFQRKLKPQEVGRCIFLSDEDRISKALPSFQRFRIYQELSNLAWIDHDGVAHRITASLALRDHLFDELEHKKKLTFKAMRAILRKQGVVDYPVGFNLESDNRDHLIGNLTSCIMRDAKKMIGSAWDRLDEEEQDSFILMLQDDQKGDDEVRSILTQQYGLSDDVAEDCLDVRLPDGHGSLSKKAIDRILPVLRDQGLIYYDAVKEAGLGEANLYDPYAALSDKLDYYGKALAGHVMGASGKFEDSDEKRYGTISNPTVHIALNQVRAVVNELIRLHGKPDEVVIEIGRDLPMGADGKRELERFQKEGRAKNERARDELKKLGHIDSRESRQKFQLWEQLAKEPVDRCCPFTGKMMSISDLFSDKVEIEHLLPFSLTLDDSMANKTVCFRQANRDKGNRAPFDAFGNSPAGYDWQEILGRSQNLPYAKRWRFLPDAMKRFEADGGFLERQLNDTRYISRYTTEYISTIIPKNKIWVVTGRLTSLLRGFWGLNSILRGHNTDDGTPAKKSRDDHRHHAIDAIVVGMTSRGLLQKVSKAARRSEDLDLTRLFEGRIDPWDGFRDEVKKHIDAIIVSHRPRKKSQGALHNDTAYGIVEHAENGASTVVHRVPITSLGKQSDIEKVRDPLIKSALLNETAGLSGKSFENAVQKWCADNSIKSLRIVETVSIIPITDKEGVAYKGYKGDGNAYMDIYQDPTSSKWKGEIVSRFDANQKGFIPSWQSQFPTARLIMRLRINDLLKLQDGEIEEIYRVQRLSGSKILMAPHTEANVDARDRDKNDTFKLTSKSPGKLQSASARKVHISPTGLIREG

SEQ ID NO: 148 - protein, 1270 aa, Mycoplasma gallisepticum
MNNSIKSKPEVTIGLDLGVGSVGWAIVDNETNIIHHLGSRLFSQAKTAEDRRSFRGVRRLIRRRKYKLKRFVNLIWKYNSYFGFKNKEDILNNYQEQQKLHNTVLNLKLEALNAKIDPKALSWILHDYLKNRGHFYEDNRDFNVYPTEELANYFDEFGYYKGIIDSKNDDDDKLEEGLTKYKFSNQHWLEEVKKVLSNQTGLPEKFKEEYESLFSYVRNYSEGPGSINSVSPYGIYHLDEKEGKVVQKYNNIWDKTIGKCSIFPDEYRAPKNSPIAMIFNEINELSTIRSYSIYLTGWFINQEFKKAYLNKLLDLLIKTNSEKPIDARQFKKLREETIAESIGKETLKDVESEEKLEKDDHKWKLKGLKLNTNGKIQYNDLSSLAKFVHKLKQHLKLDFLLEDQYTPLDKINFLQSLYVYLGKHLRYSNRVDSANLKEFSDSSRLFERVLQEQKDGLFKLFEQTDKDDEKILTQTHSLSTKAMLLAITRMTNLDNDEDNQKNNDKGWNFEAIKNFDQKFIDITKTNNNLSLKQDKRYLDDQFINDAILSPGVKRILREATKVFNAILKQFSEEYDVTKVVIELARELSEEKELENTKNYKKLIKKNGDKISEGLKALGIAEDKIEEILKSPTKSYKVLLWLQQDHIDPYSQKEIAFDDILTKTEKTEIDHIIPYSISFDDSSSNKLLVLAESNQAKSNQTPYEFINSGKAEITWEVYEAYCHKFKNGDSSLLDSTQRSKKFAKMMKTDTSSKYDIGFLARNLNDTRYATIVFRDALKDYANNHLVEDKPMFKVVCINGGVTSFLRKNFDPKSWYAKKDRDKNIHHAVDASIISIFSNETKTLFNQLTKFADYKLFKNTDGSWKKIDPKTGVVSEVTDENWKQIRVRNQVSEIAKVIDKYIQDSNIERKARYSRKIENKTNISLFNDTVYSAKKVGYEDQIKRKNLKTLDIHESAEENKNSKVKKQFVYRKLVNVSLLNNDKLADLFAEKEDILMYRANPWVINLAEQIFNEYTENKKIKSQNVFEKYMLDLTKEFPEKFSEAFVKSMIRNKTAIIYNVEKDVVHRIKRLKILSSELKENKWSNVIIRSKNESGTKLSYQDTINSIALMIMRSIDPTAKKQYIRVPLNTLNLHLGDQDFDLHNIDAYLKKPKFVKYLKANEIGDEYKPWRVLTSGTLLIHKKDKKLMYISSFQNLNDLIEIKNLIETEYKENVDSDPKKKKKASQILRSLSVILNDYILLDAKYNFDILGLSKNKIDEILNSKLDLDKIAK

SEQ ID NO: 149 - protein, 1204 aa, Prevotella ruminicola
MERILGIDTGTNSLGWAIVDKDENQYHLVAKGTNIFSEGVKIEKGIESSKAAERTEHRSVRKHYWRRKIRKIRLLTILSDNDLCPRLKHEQLRQWRLKKVYPTDDTFMEWQRTEDKAQVNPYKFRYICLTQKLDLSDITQRFILGRALYHLNQRRGFLSNRKEATKESEGTVKEGISSLSKDMKDSGCEYLGEYFYQLYQQGKKIRNHYTARKEHYLKEFKAICSKQELDDALIEKLEKAIFDQRPLKSQKGQVGTCTFEKGKSRCPSSHPLYEDFRMYSFINNIKVQVDTLYDKGERSLTDEEKQLIIPLFKRKSKRTFPFEDIAKKIAGKNNYCYIKSNEEKAYKFNYQMDTQVSGSPVNAQLEEIFGEDWLSSVCEVYTLANNKSRFQIMNDVWHVLFFYDDEDKLKEFAKDRLQLDDELAEKFSKISIPNDYAALSLKAIRKIMPYLRDYGLIYSEAVFLANLVDVLPQHVWGIKEMREAAIENVIDVMHSYDKNNIDGITLEGCVKTFLKERYQVSDDNLKKLYHPSMLDPYPRQRPNDEGVFQLGSPRISSVKNPMAMHSLFRLRKVVNLMLKKGYITPDTKVHIEFSRDLNDANKRWAIQTWQRENEKERERCRKEIEKYIASPSDTDILKYQLWEEQNHKCLYTGDEIRITDFLGDNPKYDIEHTIPRSAGGDSTKMNLTLCSSRFNRDEKKTKLPAELVNHDEILERISNWKEKYEDIDKQIRKISTKGATSKEDKDSKIRRRHYLILQRDYWRGKYQRFTMTEVPEGFSRRQGTDISVISRYARMYLKSVFKQVYIVKGIATSDFRKMWGIQDEYAKKERVNHVHHCIDAITIACIGKAEYDKLADYRHQYDDYLFQGKTKPTFDKPWPSFVIDIKHIQDELLIAHYAKDNLEKFTKKNLRGKDGRIIRDKFGNKLQMKGDTSRNSLHNDKFYGAINHEGEIKYVYRTNIEALDAKSIGNIVDPTVRSIIESAIAIHGSLKAAINKGIWMNEEKHIPIKKVRVFRNDVKKPIELKDQRDLSDKDYKQHYYVTNDGNYMMLIFSKLNNKGREIRQHVVINSLEATEVIKSHKRSQVGKVVWESYYSKEGFDLIYKLKSGTMILLYENNRDEVWDLDIRNLQKRLYIITKMKYDGRIYMMHHQEAREKKDLEEKSGSFKINEDYRPLIVNSYNQFNALVQDLDFEINDLGEIRRLI

SEQ ID NO: 150 - protein, 1178 aa, Scardovia inopinata
MGKRHNSNMAKKKISYRIGIDVGLNSTGLAAIEVDDDGAPIRILNTMSVIHDGGVDPDAAKVRGTRLAISGIARRTRRMRRRRAKRLDRLEQILEKYGYTDTEPVLEEPYGPWICRAELADGFINDDEQRRMMIGIAIRHIARHRGWRNPYQNVRALLNIDDSDLSEEYKNLKEKVQDQINDGKDLPNFTPSQLVRDYLDNFSGQPAARIRTGKAGPRGNRRDAVGILPQRMRQSDYAYELQRIFDMQKIGRDEAQELLMAVFEAKSPKGSAEKRIGKDPLTGKKRALKASLAFQKYRIVATITNLRIKTGTGSERMLSPTELNDIYTYLLRVQDDNHLPTWEDICEEVLHIGRYQLAGIGKTFEGGERISNMPPVIQTSLAIHGLSEGTLAEKLTKWWDKADDDSRESMIKLLSNTVDIDRVNEVDENFASALDFIDSLDDEELTKLDKIALPRGRAAYSEEALNKLTADMLNTGDDLFSARQRIYHVNNSWRPPQPPIGEPLGNPAVDRVLKITNRYLMNCLNRWGQPRRVTIEHTRSGFTSVKQATEHQKISDKRAEYRRDIVKQLEEAGVESVHEYDIRRWEAVQRQNGQCLYCGRDITFKTCEMDHIVPRKGPGSTNTRTNFAAVCPECNRMKSNIPFASWAETKEAKDRGVSLDKAIKQVRFFNFTKNEYSPQAQRNFKKSMIERLKQKTSDEPLDNRSIESVSWMADELYKRIDWYFNHEQYETSKKAINDDKDNLSGTQVVVYPGSITAEARNAAGLGGNIHFIGGRYKTRLDRRHHAVDACVIAMMEPGIARILTERNQLRQAQRLTARIEDDEVNWKDYPTENTAGYNKYQAWSDRMHALLEYMNNALDYDKIPVVRWERLQLGNRSAHEDTIHPLKKLPLSHEISAIDINHASTPALYEALVSLPDFSEQDGLPADPSRQINVNGERYSGDDLVSFFNSNAAQIAIQGGSAELGTAFHHARIYRCWTVGKNGKKKIFFGMIRVYQHDLLHAKNEDLFTYPLKRSSVSMRYAKKEVVHAILSGNAEYVGYLCVGDELVLDLKGDKSNDEGGSRLSGQVGEFVQKFEEDSKVNSQIVNRWTVDGFPDEAKLRLRPSMFAGEGLKNMKSELVENAAIKNILSKTGWRVSVDVISKKSPVVLRRNAFGEPRWKTNAGLPVSYRWQDTETKE

SEQ ID NO: 151 - protein, 1371 aa, Gordonibacter pamelaeae
MNLRNVESYQVGLDIGTGSVGWAVLDDNGDLCRFKGKPTWGSRVFPTAETAAEARVHRGQRRRYDRRRQRIDLLQRFFADEVAKVDPEFFIRLNQARLHPENRDPAHADYRWPLFNGSNFTEKDYYRQFPTIYHLRAHLLKSDEPADIRLVYLALHNIVKHRGNFLHQDNPSLSARNANVGDAVEALCLALDEWCGAHDVECACDEAALAEALGDASLRPGEKRERAEAALGVEKAHKKLAKAVSSAVVGYAAEFGHVFFAESEGSKFALSNDEKVEAYVCPDEGRDLFDAMRAVHSSYVLMGILSEAQGELLSVCKVGEYERYKRDLETLKSLVRAYGPERYDEFFCGPFYEGTRDYDPGKAQGYTKYNLGASKLSHEDFLKEVQKLLKDIGAQADERYADIERAIEAGAFLRRLKTSDNGTIPYQLHLEEMDAIIERQAAFYPFLAQEKDKLKSLVSFRIPYYVGPLTQKNAARDGKGEARFAWSSRKPGMEDARVYPWNWEDVIDKDQSAEDFIRRMTGTCTYLKGEPVLARCSLDYELFCVLNELAGARWTQDGDKSYRFDAADRLGIVEDLFKKRKRVTYEAAEKWLARTHGPESGKSAGGAYHVSGGQGEDAFESQLSSHYDFCKILGVDELSDADEAMAEDIILWNTVFEDRSILKRKIKLAYGDRLGDAQVRKLCQKRYTGWGRLSGELLRGLRSATDNGPKTIMDILLEGDPNHARRMGAAMNLMEILHDDLLEFQAKIDEHNRERALAVGGMSVDEVTGSPALRRGINQALRVVDEIAGIAGKPPAHIYVEVTRDEGARNKGRRTTSRYRALEAALSSIKAQCADVYAELKERDPRALDDERLTLYFMQCGKCMYSGDALDINKLQTYQVDHILPQSYVKDDSFENKVLVRPDTNQRKGDTLLLDERLIARMRGFWRTLRDAELIGEKKFNNLTRTSVSDEQMKKFVSRQLVETGQMVKQVQQLLQARYPESEVQPVKAGVSHQLRVGCALAKSREINDFHHAHDAYLACQVGRFVQYRHSAVYSEPVKMAAVVKQFIKKQAEDYRRTRELPGSDGFIVSSFMTPGFDVKTGEVFRDAWDAGAEIDRIRRCFDYKDCFISRMPEETHGAFWDATIYSPRAAGKTLSLPLKRGLDPRKYGSYSREQFAYFFVYEAVKPKKKQRVLEFAPVPVRVASALANDPDALEDYARELAEAEGLVFERIRRRKVYKYQQIIVGDSRLYVTGREEVRNARQLAFSQDETKLICRIEQGEECEEGELLDLFRSMQRKYLACAPRLARLMKVAEMEEGFIAATASGKREVLLSLTSIAAAHRNSIDLKPIGRKGSSGQMKITFSKELSTNGILFVDSSVTGMFERRCRLGL

SEQ ID NO: 152 - protein, 1388 aa, Zunongwangia profunda
MKRILGLDLGTNSIGWALVNEAENEKEISKIIKLGVRVNPLTIDEKTNFEKGRPLSTNADRTLKRGARRNLQRYKLRRENLIEILIDNHIITKETPLTEIGKGTTYQTLSLRAKAVRERIDLEDFAKVLLAINKKRGYKSSRKASNDEEGQAIDGMAIAKELYERGITPGQYVLELLENDRKYIPDFYRSDLKQEFNKIWNNQKTFYPEILTDELFKELDGKNKSQTWAICQKPFNIKGIKRITKGREKTIENYHWRVKGLSGKLNLEKLAIILQEINNDINQSSGYLGGISDKSKKLYLNKETVGEFLYKQIAKNPHTSLKNQVFYRHDYLDEFEQIWKTQSNFNANLTDELKQEIRDVIIFYQRKIKSQKSLISFCQFESWEQEYFDKETGKTKTRTVGRRVIPKSSPLFQEFKIWQNLNHLVFTNSETDEKIEIKEVEQEIRKELFEELNLRGDLNPNDLLKILRSQFKIGKLSNWKCNFEKIEGNRTNAALFNIYQKISDFEGYGIDWNKSNAKKIRKELKATFPEIGIDASILEFDAYKKQLTNQSSYELWHLLYSAEEDFKISEQDKLIYGNSSVSLKKKLHLKFGFNPEYAKMLANLSLMSDYGNLSAKAIKKILPYLEDGHLYSEACRLAGYNHSKSLTAEELEKFEPKAKLDLLKKNSLRNPVVEKILNQMVNVVNQVIDTYGKPDGVRIELARELKKSAKERAEMTKGIADGTRRNEEIKKIITQKFGIPNPTKSDLVRYRLWQELESRGYKDIFTDKYISPDKIFSSEIDIEHIIPKALLFDDSFSNKTLSFRNVNLKKANRTALDFITQDYQSNVEAYKERVETWNKDNHISKGKRNKLLMSLKDIPDGFIERDLRNSQYIARKAKRMLYEVFPNEVLATSGSITDKLRSDWDLINVMKELNLPKYKALGLTEYEERLDKGTEELFKHEVIKDWTKRNDHRHHAMDALAVAFTTHNHIQYINNLNARKDITQDNHPIIKNIENLITEVNSKGKRVFKAPMSSFRESAKEQIEAILVSFKNKNKVVTKNINQTKKEGGFNYQNAKTPRGQLHKETIYGKSKQPLEKPVKINNRFCKKQVGLIINFKEQEAVLHHLKKYDNNEKIAFSNKTLKSDPIQVNGSPLREVKIFEEIFTIRKDINPDNFKTQKHLDKIIDKGIKEVMKKRLEEYNGDFKTAFSDLDKNPIWLNQSKGITIKRATISGVTNAEPLHQAKDHLGNIILDDNGKEIPIDYVSTGNNHHVAIYQDESGNLQEEVVSFYEAVIRKNQDQPIIKKRHPKGWKFLFTMKQNEMFVFSSENFNPSEIDLLDEKNAAIISPNLFRVQKIATKNYMFRHHLETEVTNNLDFTYRHFQATEWLRNLCKVRIDHIGRIVQIGEY

SEQ ID NO: 153 - protein, 1082 aa, Methylosinus trichosporium
MRVLGLDAGIASLGWALIEIEESNRGELSQGTIIGAGTWMFDAPEEKTQAGAKLKSEQRRTFRGQRRVVRRRRQRMNEVRRILHSHGLLPSSDRDALKQPGLDPWRIRAEALDRLLGPVELAVALGHIARHRGFKSNSKGAKTNDPADDTSKMKRAVNETREKLARFGSAAKMLVEDESFVLRQTPTKNGASEIVRRFRNREGDYSRSLLRDDLAAEMRALFTAQARFQSAIATADLQTAFTKAAFFQRPLQDSEKLVGPCPFEVDEKRAPKRGYSFELFRFLSRLNHVTLRDGKQERTLTRDELALAAADFGAAAKVSFTALRKKLKLPETTVFVGVKADEESKLDVVARSGKAAEGTARLRSVIVDALGELAWGALLCSPEKLDKIAEVISFRSDIGRISEGLAQAGCNAPLVDALTAAASDGRFDPFTGAGHISSKAARNILSGLRQGMTYDKACCAADYDHTASRERGAFDVGGHGREALKRILQEERISRELVGSPTARKALIESIKQVKAIVERYGVPDRIHVELARDVGKSIEEREEITRGIEKRNRQKDKLRGLFEKEVGRPPQDGARGKEELLRFELWSEQMGRCLYTDDYISPSQLVATDDAVQVDHILPWSRFADDSYANKTLCMAKANQDKKGRTPYEWFKAEKTDTEWDAFIVRVEALADMKGFKKRNYKLRNAEEAAAKFRNRNLNDTRWACRLLAEALKQLYPKGEKDKDGKERRRVFSRPGALTDRLRRAWGLQWMKKSTKGDRIPDDRHHALDAIVIAATTESLLQRATREVQEIEDKGLHYDLVKNVTPPWPGFREQAVEAVEKVFVARAERRRARGKAHDATIRHIAVREGEQRVYERRKVAELKLADLDRVKDAERNARLIEKLRNWIEAGSPKDDPPLSPKGDPIFKVRLVTKSKVNIALDTGNPKRPGTVDRGEMARVDVFRKASKKGKYEYYLVPIYPHDIATMKTPPIRAVQAYKPEDEWPEMDSSYEFCWSLVPMTYLQVISSKGEIFEGYYRGMNRSVGAIQLSAHSNSSDVVQGIGARTLTEFKKFNVDRFGRKHEVERELRTWRGETWRGKAYI

SEQ ID NO: 154 - protein, 1186 aa, Gardnerella vaginalis
MEGNISYAIGIDVGLNSVGLAAIRLDNNGEPIRILKAMSVIHDAGIDPNGAKESDTRKAISGVARRVRRLYRQRRRRLQKLDFLLHSLGFPVVENKDLDFSDSFTPWIFRAKLADEYIADEKQRKQMLSVAIRHIARHRGWRNPYQSIKSMTQETEYSEFYNELLKNIEKFAPGVSCEGSTPAQLVRDYLLSQQGKASRRLRITTDDRRKNHPNSLDPVLPRKLMQSDNMLEILNIFNVQHIDNKYVREQIINAVFYAKSPRGSAENRVGKDAITGKGKRALKASLAFQKYRIISTISNLRIRENSKERCLTIEEKQSVYKLLTTSTDEYSKEKSAEAPLYTWIDVADCLGIERYKLRGVGSQIEDGESVGNRPPMLNSELAILYANAKSLKQSLITWWLAANRTQEDKEAFIEILSNTVDIEAIHDNPEYQDKYGSVIAFIDSMDETEIAALENISLPNGRAAYSLETLDKLNKQMLETDDDLFEARKKLFNLPNNWRPSEAPIAEPTGNPSVDRVLKIVHRFLISAKNRWGNPERINIEHVRSGFQSKKMANSYKKLLDKRTEGKENLKAMMRNSLHLGTSDSISDADIRRYEAVQRQNGQCLYCGSEITYHTCELDHIVPRKGPGSTNTRENLVATCSSCNAQKCNTPFATWCEESTYCKNHDISVDSAINRVRAFIFPPNSYDKRGASQFKKEVIARLKQKVGDEAFDNRSIESVAWMANELHRRIDWYYNSQNYQTNNGISDITNKAQTNVGVYAGSLTAIARRMSGIDGKLEFFDGRRKTRFDRRHHAVDASVIAMMTPGIAQILAIKCNLRETQLLQGNKVVPGGIDWKEYPTANDQGYQQYANWSVRMNALLELLNEEMRADRIAVVNSIRLRYSNSSVHKDDVHALLKLHVGDEIDSETIRRASTPALYCALTRNPDYDVNNGLPENTDRTILLHDKKLNADDSITFFKSKAAQLFVREGSVEIGNSIHHLRIYEYFEKLKSGKVKKSYGMIRVFQDDLHRYIHEDLFSCDLPEQSISMRYADTKVAHAVQTGNANYLGYLVPGDEIIVDFSHVKLSGYIGEFVEFLNKIGANCAAYKHWVVAGTDDKTTLILKPSMISSEGIDKLYSNCERNNFDYASYEKSIDKILVDKGWRVSVNVLDQYKAATIRRNALGEPRWASRSHLPISWSWDTGENRE

SEQ ID NO: 155 - protein, 1434 aa, Bacteroidetes oral
MKNILGLDLGTNSIGWAYVKQAQNDSEKSEIAELGVRVNPLTVDEKTNFEKGKPISTNADRTLKRGARRNLQRYKLRRQELIELLKDYQVISDKTILAEDGKETTFETLRLRVKSAKEQVSLEELARILLMINKKRGYKSSRKAKNEDEGQLIDGMEIARRLYDENLTTGQLSLQLLKEGKKSLPDYYRSDLQHELDKVWNFQKQFHPDILTDEFYTSIQGKGQKATRESFSSKYGIDTAENKGSREEKKLQAYQWRADATHKELTKEELAFVITEINNNINNSSGYLGAISDRSKELIFANETVGEYLWKQIQNDPHTSLKNQVFYRQDYFDEFERIWETQSGFYPQILTESLKNELRDILIFYQRKLKSQKALVSICEFESKEIPLKDKQGNPISKNGIPVTKLVGPKVAPKSSPLFQEFKIWQNLNNVLVRPKGSRKRKVTTNQQSTLLEGQEPVFELNLEQKELLFEELNLKGNLKTDYCLELIGYSAKEWEMNYPTLEGNKTNKALYEAYLKIIDSEGYDAKKLLKVKTDKDDINLDDIKVSASEIKTMISDIFNELGINTKILDFDAELERKQFEAQASYRLWHLLYSYEGDDSKSGNELLYRLLEDKFGFKREHSKTLANVSLLSDYGNLSTKAIRTIYPYIKENKFSTACELAGYRHSKLSISKEENENRTLKDTLDVLKKNSLRQPVVEKILNQMINLINELIEKHSEKDEKGNIVKYFKFDEIHIELARELKKNAEERRELDSKVREGKDRNEKIITILKSEFGLPYPTKNDITRYRLYEELKDNGYKDLYTNTYIPREKLFSKEIDIEHIIPKSRLFNDSFSNKTICYRQDNLNKGERTAYDYIEGLGKTQLDEYLNRVENLYTNKFITKAKYRNLLKKESEIGDGFIERDLRETQYIAKKAKEMLLQITRHVVSTTGSITDRLRDDWELVNVMRELNLPKYKVLGLTEIQERKNGQTVEVITDWTKRNDHRHHAMDALTVAFTKHSHIQYLNFLNARKDEKHKEYSNIMGIQQLETEKTTDKDGKDRRVFKTPIPNFRQVAKEHLESILISHKTKNKVVTRATNKIAGSKKQQETLSPRGQLHKETVYGKYRRYVQKEEKIGSKFDLQTIERVANPLYKRLLTKRLEENGGDPKKAFTGKNALAKSPIYLDETQTQQLPEKVKLVWLETDFSIRKDITPDNFKDEKSIDKVLDEGIKRILKDRLKSFDGDAKRAFTDLEQNPIWLNKEKGIAIKRVTISGVSNAEPLHTKKDHLGNEIFDDTGKPIPVDYVSTGNNHHIAIYRDENGNLQEKAVSFFEAVTRANQGLPTVDKTYNQHLGWQFLFTMKQNEMFVFPNKETGFDPQEIDLLDPKNKKLISPNLFRVQKISTKNYFFRHHLETSVETHNALNGVTYKSQLGLNGITDIIKVRINHLGDIVHIGEY

SEQ ID NO: 156 - protein, 1341 aa, Unknown
  Peptoniphilus sp.
MWGSRLFEEASTAQDRREHRSNRRRLERRKYRLDLLEELFVEEINKIDPEFFIRLRESKFHFEDRSLKNTFILFNDKMEGGYNDKVFFSKYPTIYHLRSALINGNKEDVRAVFLAIHNILKNRGHFLLAGNDINISLSLNDTLTDLFEYLKIHLGIEVEFENKLKDIEKIALDKNLSKSDKQKKIVQLLETDYKKQLADVFKLSLGLTANMENIFGKENEQGLEFINAENKIKKIQFDSSYEENIAEFDQFYGEYFEIIDICKKIYDAISLSQILVDGKGLSESKVLSYEKHKEDLKLLKKVLKNIDKAYDNKGEDRLVYKVLKEDKDKGTNYVNYSKLSNNGTATTKEEFYKFLSKNLDLKKFGKLNKEDIETLDYINSEILLGRFLPLQKEKINGVIPYQLQMKELTQILNNASKYLPFLNKIEDGMTVKDKIISLIKFRIPYYVGPLNEYNRIENGNGFAWIEKKKNEKIFPWNFNDVVDIEKSAEKFINNLTNKCTYIKEETVLPKNSIIYSKFMVLNELNNLQYGNKKLDIELKMKMYTDLFLEKKDNRKVTEKRILEYFRINGINDGKEKLTGLNNEIHADMKSYRDMCEIMGENFNINVAENIINWITVFHGEKKILINKIKNVYGKMFNDEQISKLSKLNYSDWGRLSKKLLTDIKCYIDADGINFPVSILEAMEVSNKNLMELLSNKYEFISCIDDINNKYFGDRDISASELIDELYVSPAVKRGIWQSVRILEEIVSIIGHNPKKIFIEMTRHNEEKVQKSSRRHNLEELYKAIRKDPEYVELIKEFDSTTDTDSFKIKKLYLYFMQLGKCAYSKEKIDFDKLFTDSYDIDHIYPRSKTKDDSIHNNLVLVKAKYNREKTDVYPIDINIQKNMNSFWNFLYTKKFITEEKYKRLIRTSDLTDEELAKFISRQLVETSQSTKATAEVLKQIYGDSDICYVKAENVSDFRYGSSRQKDKNDIQKLFVKCREVNHFHHAKDAYLNIVVGNVYDVKFTKNPVNFIKKNKMGNKSNYSLNHMFCFDVERNGYKAWDSSETIKTVGRMMKSNDVRITKHVHPTRGELYDATIYKAKIAKTGSYMPLKSSKNTPLSDVTKYGGYTKIKIAYYSVYKYKFSDKNLIKTEIRLIPIPIYLSKNDDDIKEYVKNYLNDRVNSKLIDFTKIYDKLYVNSLIKINGYLYYLGGKTNDRVWIDNAVSIVLDDKIEYLIKRISNDIKYGYEINVSDDELMDIYESLAEKANKKIFYNRLSDFEKIFSNMDVKKKFVKLEKNDKCRVLLQLLNVLTDSQTTYKLEMVGLKHSRSNIGMKISNLEEFKVINSSITGLYSNEIDILNI

SEQ ID NO: 157 - protein, 1391 aa, Lactobacillus gasseri
MTKIKNEYIVGLDVGTNSCGWVAMDFQNTILRMHGKTAIGSHLFDAGNSAADRRAFRTTRRRIKRRKWRLKLLEEIFDPYMTEVDPYFFARLKESGLSPLDKRKNVSSIVFPTALEDKKFYCNYPTIYHLRYDLMSEDKKFDLREIYLAIHHIVKYRGNFLYNTPVKDFEASKIDVKDSLEKLNELYERLDSEFTVELDSSNALEIEKIIRDKKVFKINKVKSIHQLLSLKTENKERTKLIKDVSKQIINAILGYKTKFETILLKNISKDEADDWEFKLTDVDADNKFENLIGDLNENEQEILLEIRNLANAITLSNIVEEGKTLSESMIDKYNKHSDDLELLKQVISDHPDRDKAKKLALAYDLYVNNRHGKLLQAKDVLGSKKTLSKEDFYKEVKKNLDDSKASQEILDTIALDSFMPKQRTNENGVIPYQLHQLELDRIIKNQGKYYPFLKEVNPVSSHLKEAPYKLDELIRFRVPYYVGPLISPNESTKNKQTKKNQNFAWMIRKEQGQITPWNFDQKVDRMASANKFIKRMTTKDTYLLGEDVLPANSLLYQKFTVLNELNNIKINGKRISVPLKEELYNNLFKKNSTVTTNKLKSYLKENYNLINVEIKGLADEKKFNSGLTTYNKLRNLKIFDQQLDDLNYDKDFERIIEWSTIFEDKAIYKDKLKTIKWLSDRQIDKLSKIRMQGWGQLSKKLLSQLTDNNGQTIIEQLWDSQNNFMQIVNQSDFKDAIAVANQNLLVNTSVEDILNEAYTSPANKKAIRQVVKVVDDIVKAASGKVPKQIAIEFTRDADDKAKISQTRANKLRKVYKELSNELASETIRNELERVAKDQKLLKDKYYLYFMQLGRDAYTGEPINIDDLGQYDIDHILPQSFIKDDSLENRVLVKKAVNNGKSDNVPVKLYGNRMAADLGMTIRHMWEKWKDQGLITKTKYNNLIIDPDKINKYESSGFIHRQLVETSQIIKLVSTILQSKYPDTEIIVVKARYNHYLRKHLNLYKSREVNDYHHAIDAYLSAICGNLLYQVYPYLRPFFVYGQYKKFSSDPKKEKIIYDKTRKYNFISQIFENKSNDIISLETKKKVFDKKDIIEKLKHAYNYKYMLVSRETETHDQEMFKMTVYPRLSRDTKKSRNLISKKKDMPTEIYGGYTNNSDAYMVIARINKKKGTEYRVFGVPMRELVNLRKAEKNGRYNAYLKQVLEPEIMYSKNGKKNKTISSFEIVKAKVPYKQVILDGDKKFMLASSTYVQNAKQLTLSQNSMQAITDNCENDTEEEKALEEKALIEAYDEILTNIDKYLPLFDINKFREKLHAGREKFINLSLDVKKDTILQVLNGLHDNAVMPKIKSLGLSTPLGFMQFSSGVPLSENAKLIYQSPTGLFEKRVKISDL

SEQ ID NO: 158 - protein, 1426 aa, Sphingobacterium spiritivorum
MKHILGLDLGTNSIGWALIKQDFENKQGEILGMGSRIIPMSQDILGDFGKGNSVSQTAERTKYRSVRRLRERFLLRRERLHRILNVLGFLPEHYASQIDFTKRFGKFKEETEPKLVYSNEGFIFKKSFEEMLSDFKTHQPQLLEDNKKIPYDWTIYYLRKKALSRKIEKEELAWILLNFNQKRGYYQLRGEEEEENPNKLIEFYSLKIVDVLADEPQKGKSDIWYSLILENGWIYRRSSKTPLFDWKEKTRDFIVTIDLNDDGSVKTDKEGNEKRSFRAPGENDWTLVKKKTEQEIDSSRKTVGTYIYETLLKNPKQKIKGKLVRTIERKFYKTELKQILEKQKEFHPELRQDDLYSDCVRELYKNNEAHQLTLSKKDFVHLFMEDIIFYQRPLGSQKSSISNCTLEFRKYKDENGTEHTQYLKAIPKSNPYYQEFRIWQWMYNLNIYKKEDDTNVTKDFLNTKADFESLFEFLNNRKEVDQKALLKHFKLNDKTHRWNYVEDKKYPCNETKTMILSRLDKVENISDDFLTREMEQKIWHIIYSVNDKVEYEKALKSFAGKNNLEDNSFFEAFKKFPPFKSEYGAFSEKAIKKLLPLMRMGKFWNYNNISEQSKSRIQKIITGEYDENIKDKVREKAIHLTTETDFQGLQLWLVQYIVYGRHSEAAMLGKWNSADDLEEFLKEFKQHSLRNPIVEQVITETLRVVKDIWQKYGNGAKDFFREIHIELGREMKLPAEERERLTRQISENENTNFRIKALLAEMMDDNSVENVRPFSPMQQEILKIYEEGVLNSDIEIEDDILKISKTAQPSSSDLKRYKLWLEQKYKSPYTGQIIPLNKLFTPEYEIEHIIPQSRYFDDSFTNKIICESAVNKLKDNYIGLEFIKKLGGSIVECGNGKSVAILKHDAYEDFIKKHYANNRSKRNKLLLEDIPEKMIERQMNDTRYISKYISGVLSNIVRVEDGTDEGVNSKNIVPGNGKITTQLKQDWGLNDVWNDLILPRFERMNHLTNSTDFTAWNENHQKFLPTVPVEFSKGFSKKRIDHRHHALDALVIACATKDHVNLLNNQSAKSDTKRYDLKKKLMKFEKVAYNHPQTGERIEREAPKQFLKPWETFTIDAKNHLETIIVSFKQNLRVINKATNYYEKYVEKEGTKVKERVEQKGTNWAIRKPMHKETVSGKIDLPRIKVPKGKILTATRKSLDTSFNLKTIGSITDTGIQKILKNYLQYKDNNPELAFSPEGIEDMNKNIEKFNNGKAHQSISKVRVFELGSKFPLGQSGNKKEKYVEAAKGTNLFFAIYQDKNGKRSYETIPLNEVIERQKQGLSVVDLKGVDDFYLSPNDLVYVPSEDELENISMIDFNKMSSERIYKVVSFTGNQIFFVRQDIATSVVNKAEFSTLNKMERAIDGTMIKETCVKLQIDRLGNISKI

SEQ ID NO: 159 - protein, 1361 aa, Lactobacillus casei; identical to SEQ ID NO: 75

SEQ ID NO: 160 - protein, 1436 aa, Bacteroides fragilis
MKRILGLDLGTNSIGWALVNEAENKDERSSIVKLGVRVNPLTVDELTNFEKGKSITTNADRTLKRGMRRNLQRYKLRRETLTEVLKEHKLITEDTILSENGNRTTFETYRLRAKAVTEEISLEEFARVLLMINKKRGYKSSRKAKGVEEGTLIDGMDIARELYNNNLTPGELCLQLLDAGKKFLPDFYRSDLQNELDRIWEKQKEYYPEILTDVLKEELRGKKRDAVWAICAKYFVWKENYTEWNKEKGKTEQQEREHKLEGIYSKRKRDEAKRENLQWRVNGLKEKLSLEQLVIVFQEMNTQINNSSGYLGAISDRSKELYFNKQTVGQYQMEMLDKNPNASLRNMVFYRQDYLDEFNMLWEKQAVYHKELTEELKKEIRDIIIFYQRRLKSQKGLIGFCEFESRQIEVDIDGKKKIKTVGNRVISRSSPLFQEFKIWQILNNIEVTVVGKKRKRRKLKENYSALFEELNDAEQLELNGSRRLCQEEKELLAQELFIRDKMTKSEVLKLLFDNPQELDLNFKTIDGNKTGYALFQAYSKMIEMSGHEPVDFKKPVEKVVEYIKAVFDLLNWNTDILGFNSNEELDNQSYYKLWHLLYSFEGDNTPTGNGRLIQKMTELYGFEKEYATILANVSFQDDYGSLSAKAIHKILPHLKEGNRYDVACVYAGYRHSESSLTREEIANKVLKDRLMLLPKNSLHNPVVEKILNQMVNVINVIIDIYGKPDEIRVELARELKKNAKEREELTKSIAQTTKAHEEYKTLLQTEFGLTNVSRTDILRYKLYKELESCGYKTLYSNTYISREKLFSKEFDIEHIIPQARLFDDSFSNKTLEARSVNIEKGNKTAYDFVKEKFGESGADNSLEHYLNNIEDLFKSGKISKTKYNKLKMAEQDIPDGFIERDLRNTQYIAKKALSMLNEISHRVVATSGSVTDKLREDWQLIDVMKELNWEKYKALGLVEYFEDRDGRQIGRIKDWTKRNDHRHHAMDALTVAFTKDVFIQYFNNKNASLDPNANEHAIKNKYFQNGRAIAPMPLREFRAEAKKHLENTLISIKAKNKVITGNINKTRKKGGVNKNMQQTPRGQLHLETIYGSGKQYLTKEEKVNASFDMRKIGTVSKLAYRDALLKRLYENDNDPKKAFAGKNSLDKQPIWLDKEQMRKVPEKVKIVTLEAIYTIRKEISPDLKVDKVIDVGVRKILIDRLNEYGNDAKKAFSNLDENPIWLNKEKGISIKRVTISGISNAQSLHVKKDKDGKPILDENGRNIPVDFVNTGNNHHVAVYYRPVIDKRGQLVVDEAGNPKYELEEVVVSFFEAVTRANLGQPIIDKDYKTTEGWQFLFSMKQNEYFVFPNEKTGFNPKEIDLLDVENYGLISPNLFRVQKFSLKNYVFRHHLETTIKDTSSILRGITWIDFRSSKGLDTIVKVRVNHIGQIVSVGEY

SEQ ID NO: 161 - protein, 1517 aa, Unknown
  Bacteroides sp.
MKKIVGLDLGTNSIGWALINAYINKEHLYGIEACGSRIIPMDAAILGNFDKGNSISQTADRTSYRGIRRLRERHLLRRERLHRILDLLGFLPKHYSDSLNRYGKFLNDIECKLPWVKDETGSYKFIFQESFKEMLANFTEHHPILIANNKKVPYDWTIYYLRKKALTQKISKEELAWILLNFNQKRGYYQLRGEEEETPNKLVEYYSLKVEKVEDSGERKGKDTWYNVHLENGMIYRRTSNIPLDWEGKTKEFIVTTDLEADGSPKKDKEGNIKRSFRAPKDDDWTLIKKKTEADIDKIKMTVGAYIYDTLLQKPDQKIRGKLVRTIERKYYKNELYQILKTQSEFHEELRDKQLYIACLNELYPNNEPRRNSISTRDFCHLFIEDIIFYQRPLKSKKSLIDNCPYEENRYIDKESGEIKHASIKCIAKSHPLYQEFRLWQFIVNLRIYRKETDVDVTQELLPTEADYVTLFEWLNEKKEIDQKAFFKYPPFGFKKTTSNYRWNYVEDKPYPCNETHAQIIARLGKAHIPKAFLSKEKEETLWHILYSIEDKQEIEKALHSFANKNNLSEEFIEQFKNFPPFKKEYGSYSAKAIKKLLPLMRMGKYWSIENIDNGTRIRINKIIDGEYDENIRERVRQKAINLTDITHFRALPLWLACYLVYDRHSEVKDIVKWKTPKDIDLYLKSFKQHSLRNPIVEQVITETLRTVRDIWQQVGHIDEIHIELGREMKNPADKRARMSQQMIKNENTNLRIKALLTEFLNPEFGIENVRPYSPSQQDLLRIYEEGVLNSILELPEDIGIILGKFNQTDTLKRPTRSEILRYKLWLEQKYRSPYTGEMIPLSKLFTPAYEIEHIIPQSRYFDDSLSNKVICESEINKLKDRSLGYEFIKNHHGEKVELAFDKPVEVLSVEAYEKLVHESYSHNRSKMKKLLMEDIPDQFIERQLNDSRYISKVVKSLLSNIVREENEQEAISKNVIPCTGGITDRLKKDWGINDVWNKIVLPRFIRLNELTESTRFTSINTNNTMIPSMPLELQKGFNKKRIDHRHHAMDAIIIACANRNIVNYLNNVSASKNTKITRRDLQTLLCHKDKTDNNGNYKWVIDKPWETFTQDTLTALQKITVSFKQNLRVINKTTNHYQHYENGKKIVSNQSKGDSWAIRKSMHKETVHGEVNLRMIKTVSFNEALKKPQAIVEMDLKKKILAMLELGYDTKRIKNYFEENKDTWQDINPSKIKVYYFTKETKDRYFAVRKPIDTSFDKKKIKESITDTGIQQIMLRHLETKDNDPTLAFSPDGIDEMNRNILILNKGKKHQPIYKVRVYEKAEKFTVGQKGNKRTKFVEAAKGTNLFFAIYETEEIDKDTKKVIRKRSYSTIPLNVVIERQKQGLSSAPEDENGNLPKYILSPNDLVYVPTQEEINKGEVVMPIDRDRIYKMVDSSGITANFIPASTANLIFALPKATAEIYCNGENCIQNEYGIGSPQSKNQKAITGEMVKEICFPIKVDRLGNIIQVGSCILTN

SEQ ID NO: 162 - protein, 1399 aa, Olsenella uli
MNLRNTTDEYNIGLDMGTNSVGWAVTDKAGAIAHFKGKPTLGSRLFDAAQTAAGARIHRSQRRRYVRRRWRLDLLQSLFQDEVSKVDSEFFCRLRQSRLYVGDREKGHADYTWPIFNDSDFNEVDYYKRFPTIYHLRKWLMETDEKADIRLIYLATHNIVKHRGNFLRENNKSLSSRDANPAQAVKSLRLALNDWCSERDYECAWKGEEDDGAIDEAILNVLADGEKGRSDQAKEIAKLTGVDCGDAKQSKQCNEAIAKAIVGLKVEMKNIFGEFPAEKTSYIYLSSDEDVEAVRESCPDDSGELFQALCKLYSAYILQELLSYADPSGQTISANMVAKYKQYGRDLRLLKELTRTYAPQKYDLFFRGETYAGSSDYVVDEARGYTRYNLGTTKANYDDFQKSVKELFKGTDALQDERYQEMMVAFGEQKFLRRLKTSDNGSIYYQLHLEELHTILENQGKHYPFLLSEEDKIESLVSFRIPYYVGPLTRKNAAIGHDGKERFAWSSRKDGMEHAVITPWNWEEIIDRDKSAEDFIMRMTGDCTYLQGEPVLPKCSLLYEEFCALNEFNGAHWTVDGDDERRFDAAQRERIMCDLFRRTRSVTYNKVSDWLERKYNFTGARVRGGQGEHGFESKLGSYIFFCKDVFKTDGLDEADYTMIEQIILWSTLFEDRDILKRKIEEAYGGDRLTSEQIKVICKKRFTGWGRLSKRLLTDIKVNTDTGRKSIMDVLREGNPNNGQRSRTMVFMEVLRDEDLGFQKAIDGLNRDYFREHNNGLMDVNDLPGSPAIRRSINQAVRIVDEIASIARKEPTNIFIEVTREEDDPRKKGKRTKRRYDAIKSALEKFKKDDPSLWKELCEKAPGDMDERLSLYFMQRGKCMYSGRPIKIEELHTGKYEVDHIIPRSYIKDDSFENKVLVYREENQHKTDALLIDSSIRQKMGGYWRMLHDAKLVGDKKFRNLFRNHIDDKAMKGFVARQIVETSQMVKLVQTLFEARYPNTRIVPVKAGISHDLREAAGLVKCREANDFHHAHDAFLACRIGLFIQKRHPSVYDNPIGLARIMRDYARMQAREYKKSHCLAHTQGFIVNSFLSSGFDEETGEIFKDDWDAKAEVEGIRRVLNCRQCFISRMPVEGDTRYGGRYWGETIYSPKGKHKHEIPLKQGLDPNLYGGYSDLLYSYFLIYEASDVSSGERVLRFIGIPTSIAARMANQKRLEEYVSRLALQENLEHVRMVRKIMKKQLIEVDNCRLLVTAADAVTNATELAFSLDEMKIISTCAKCINGADPSAIDKIGNAQDSFFDNLKRRGSDRCALLFSQLKLDKLSQNFYMISSDDKSKILISILDRIRAKSNSVDLSLVGGAKHAAQMKFDFNAKLNNPASSFVLIDQSVTGMFERRTRIGL

SEQ ID NO: 163 - protein, 1398 aa, Veillonella atypica
METQTSNQLITSHLKDYPKQDYFVGLDIGTNSVGWAVTNTSYELLKFHSHKMWGSRLFEEGESAVTRRGFRSMRRRLERRKLRLKLLEELFADAMAQVDSTFFIRLHESKYHYEDKTTGHSSKHILFIDEDYTDQDYFTEYPTIYHLRKDLMENGTDDIRKLFLAVHHILKYRGNFLYEGATFNSNAFTFEDVLKQALVNITFNCFDTNSAISSISNILMESGKTKSDKAKAIERLVDTYTVFDEVNTPDKPQKEQVKEDKKTLKAFANLVLGLSANLIDLFGSVEDIDDDLKKLQIVGDTYDEKRDELAKVWGDEIHIIDDCKSVYDAIILMSIKEPGLTISQSKVKAFDKHKEDLVILKSLLKLDRNVYNEMFKSDKKGLHNYVHYIKQGRTEETSCSREDFYKYTKKIVEGLADSKDKEYILNEIELQTLLPLQRIKDNGVIPYQLHLEELKVILDKCGPKFPFLHTVSDGFSVTEKLIKMLEFRIPYYVGPLNTHHNIDNGGFSWAVRKQAGRVTPWNFEEKIDREKSAAAFIKNLTNKCTYLFGEDVLPKSSLLYSEFMLLNELNNVRIDGKALAQGVKQHLIDSIFKQDHKKMTKNRIELFLKDNNYITKKHKPEITGLDGEIKNDLTSYRDMVRILGNNFDVSMAEDIITDITIFGESKKMLRQTLRNKFGSQLNDETIKKLSKLRYRDWGRLSKKLLKGIDGCDKAGNGAPKTIIELMRNDSYNLMEILGDKFSFMECIEEENAKLAQGQVVNPHDIIDELALSPAVKRAVWQALRIVDEVAHIKKALPSRIFVEVARTNKSEKKKKDSRQKRLSDLYSAIKKDDVLQSGLQDKEFGALKSGLANYDDAALRSKKLYLYYTQMGRCAYTGNIIDLNQLNTDNYDIDHIYPRSLTKDDSFDNLVLCERTANAKKSDIYPIDNRIQTKQKPFWAFLKHQGLISERKYERLTRIAPLTADDLSGFIARQLVETNQSVKATTTLLRRLYPDIDVVFVKAENVSDFRHNNNFIKVRSLNHHHHAKDAYLNIVVGNVYHEKFTRNFRLFFKKNGANRTYNLAKMFNYDVICTNAQDGKAWDVKTSMNTVKKMMASNDVRVTRRLLEQSGALADATIYKASVAAKAKDGAYIGMKTKYSVFADVTKYGGMTKIKNAYSIIVQYTGKKGEEIKEIVPLPIYLINRNATDIELIDYVKSVIPKAKDISIKYRKLCINQLVKVNGFYYYLGGKTNDKIYIDNAIELVVPHDIATYIKLLDKYDLLRKENKTLKASSITTSIYNINTSTVVSLSNKVGIDVFDYFMSKLRTPLYMKMKGNKVDELSSTGRSKFIKMTLEEQSIYLLEVLNLLTNSKTTFDVKPLGITGSRSTIGVKIHNLDEFKIINESITGLYSNEVTIV

SEQ ID NO: 164 - protein, 795 aa, Prevotella disiens
MEKQRILGLDPGTNSLGWAVLDFDNSKQEYNLVRKGEVIFEEGVGKSKRGEFSKAAYRTFYKSTRKHYFRRRLRKIEVLKVLVKYDFCPYLSDDLLKQWHEKKIYPAVKEFMDWQRTSDAEGKNPYYDRHCCLNEKLDLSLKSDRYVLGRALYHLTQRRGFKSNRLIQNNDENEEGKVKKGISELSTEMQEANCNYLGDYFYKLYTEKGNTVQIRKRYTDREKHYKNEFNAICEKQELNETIVKELDKAIFFQRKLKPQRHGVGKCTFEPNNRRCAISHPDFERFRMLCFINNIKIKTPFEENLRPLNNEEKALIEPLFYRKSIKNFDFEEIAKKLAGKNNYCYIKDDSSKQYKFNYRMSQGASTCQTIAKLKSIFGEEWKNGIAETYTNRRKKEGLKKQAEMVDDIWNVLYSVSECDVLKDFAINKLQLDEKTADNFSKTKLAQGFATLSLKAIRKILPFLEQGFGYTEAVFLANIPTVVGKEYWNNEDIRNDIMEEIKTIFYHNTLKTNDSHNTILFCIKDILSNNFDLAPGAIDKLYHPSMINVYKDVIPNEDGILQLGSPKIDAVKNPMAMRSLHIIRKVVNELLREGIINSDTEVRIEYARELNDANKRHAIADWQKKQYGKHQKYRKEIKELFKAETGFEIEPNETDILKFELWEEQNHICLYTGQEIGISEFVGENPKYDIEHTIPRSLGGDSTKMNMTLCENKFNRENKQKKLPSELANHSEILERIDDWKKKIYILQKKYDSIRTHNGMDKENKDKKIVSMQVRISGSSICVYSQNTLLWLQYGYN

SEQ ID NO: 165 - protein, 1428 aa, Unknown
  Burkholderiales bacterium
MGKTHIIGVGLDLGGTYTGTFITSHPSDEAEHRDHSSAFTVVNSEKLSFSSKSRTAVRHRVRSYKGFDLRRRLLLLVAEYQLLQKKQTLAPEERENLRIALSGYLKRKGYARTEAETDTSVLESLDPSVFSSAPSFTNFFNDSEPLNIQWEAIANSPETTKALNKELSGQKEADFKKYIKTSFPEYSAKEILANYVEGRRAILDASKYIANLQSLGHKHRSKYLSDILQDMKRDSRITRLSEAFGSTDNLWRIIGNISNLQERAVRWYFNDAKFEQGQEQLDAVKLKNVLVRALKYLRSDDKEWSASQKQIIQSLEQSGDVLDVLAGLDPDRTIPPYEDQNNRRPPEDQTLYLNPKALSSEYGEKWKSWANKFAGAYPLLTEDLTEILKNTDRKSRIKIRSDVLPDSDYRLAYILQRAFDRSIALDECSIRRTAEDFENGVVIKNEKLEDVLSGHQLEEFLEFANRYYQETAKAKNGLWFPENALLERADLHPPMKNKILNVIVGQALGVSPAEGTDFIEEIWNSKVKGRSTVHSICNAIENERKTYGPYFSEDYKFVKTALKEGKTEKELSKKFAAVIKVLKMVSEVVPFIGKELRLSDEAQSKFDNPYSLAQLYNLIETERNGFSKVSLAAHLENAWRMTMTDGSAQCCRLPADCVRPFDGFIRKAIDRNSWEVAKRIAEEVKKSVDFTNGTVKIPVAIEANSFNFTASLTDLKYIQLKEQKLKKKLEDIQRNEENQEKRWLSKEERIRADSHGICAYTGRPLDDVGEIDHIIPRSLTLKKSESIYNSEVNLIFVSAQGNQEKKNNIYLLSNLAKNYLAAVFGASDLSQITNEIESTVLQLKAAGRLGYFDLLSEKERACARHALFLNSDSEARRAVIDVLGSRRKASVNGTQAWFVRSIFSKVRQALAAWTQETGNELIFDAISVPAADSSEMRKRFAEYRPEFRKPKVQPVASHSIDAMCIYLAACSDPFKTKRMGSQLAIYEPINFDNLFTGSCQVIQNTPRNFSDKTNIANSPIFKETIYAERFLDIIVSRGEIFIGYPSNMPFEEKPNRISIGGKDPFSILSVLGAYLDKAPSSEKEKLTIYRVVKNKAFELFSKVAGSKFTAEEDKAAKILEALHFVTVKQDVAATVSDLIKSKKELSKDSIENLAKQKGCLKKVEYSSKEFKFKGSLIIPAAVEWGKVLWNVFKENTAEELKDENALRKALEAAWPSSFGTRNLHSKAKRVFSLPVVATQSGAVRIRRKTAFGDFVYQSQDTNNLYSSFPVKNGKLDWSSPIIHPALQNRNLTAYGYRFVDHDRSISMSEFREVYNKDDLMRIELAQGTSSRRYLRVEMPGEKFLAWFGENSISLGSSFKFSVSEVFDNKIYTENAEFTKFLPKPREDNKHNGTIFFELVGPRVIFNYIVGGAASSLKEIFSEAGKERS

SEQ ID NO: 166 - protein, 1025 aa, Unknown
  gamma proteobacterium
MGGYMPQLMRYRLALDIGSTSIGWAMIRLSMQNEPIAIIRMGVRIFSDGRNPKDGSSLAVTRRVARQMRRRRDRLLKRKTRLLNALVQKKFFPEDADARKALVVLNPYELRKEGLYRQLSGPEFGRALFHISQRRGFLSNRKTDKKDNDSSVLKKAIVDLRQQLEVENCQTIGEWLFKQQQSGKSVRARLRGKTQKDKAYDFYIDRAMIAHEFDTLWVSQAKYDPLLFNEDARAILRDILLYQRPLKPVKPGRCTLIPDESRAPLALPLTQQARIYQELNHLRITTPALGAQALTVAQRNTIAALLEKSDVTFVKIAKALGLTSTTEFNLQDIKRDRLKGNATAIILARNQYFGRRWHDFNADLQNLIVDKLVNEGSETALIEWLKANTDVDESAAERVSGVTLPEGYGSLSVAALRRLLPALKEDVVVYSEAVKRAGFDSHSALSLIEQTGELYQELPYYGEVLQRHVGFGSGDPNDSPERRFGKIANPTVHIGLNELRKIINALIKRYGNPAEVVVELARDLKLSREKRKEIQEEQKQRQDRNEKRIKDACEILGIDPLVIDRGKRREISQKMQLWDELNPKDAANRRCPYTGDQISIEKLLSAEVEIEHILPFSKTLDDSLNNKTVAMRRANRDKGNRTPYEAFGESLNPDYDYDAILQRASLMPREKRKRFASDGYQQWLRDDKDFLSRALNDTAYLSRIAKEYLTLICPPNSVRAIPGRMTAQLRAMFGLNRLLSEGGIKNREDHRHHAIDAAVIGVTDQGLLQKFSRASARTRELQLSRLVDDMPLPWDTYREHVTRALEHLVVSHKPDHGYQGKMHEDTAWGLRDNGQVTRRVRSEDGGPRQRLLENKNVVKINSTRDFSRHGIDEQGQVNAYKGYVGGSNYCIEIWIDEKGKWNSDVVSTFQAYQIVRELGEKAAWQKLRNPLLSLSAKPLVMRLIIDDVVKMQIAGQNKIMRVVKIAQNGQIFFAEHNEANVDARDKDKNNPFKYISKTAGSLQKAGGIHMAISPIGDARPVRYGR

SEQ ID NO: 167 - protein, 1364 aa, Pediococcus acidilactici
MGDRKYNLGLDIGTSSIGFAAVDENNQPIRVKGKTAIGVRLFEEGKTAADRRGFRTTRRRLSRRRWRINLLNEIFDAHLAEVDPTFLARLKESNRSNLDPKKSFQGSLLFPERKDYQFYEEYPTIYHLRKALMEKDRKFDFREIYLAVHHIIKYRGNFLNGTPMRSFKVENIELDTLFDQLNQLYAEIVPDNELAFDLAQVADVKDVLSSTTIYKMDKKKQLVKMMLLPASNKALQSENKKIVTQFVNAILNYKFKLDVLLQVETDADWSLKLNDEGADDKLEEFTGDLDENRLEIIDLLQRLHNWFSLNEITKDGNSLSAAMVEKYENHHHHLGLLKKVIENHPDAKKAKALKETYTAYVGKTDDKTQNQDDFYKAVEKNLDDSPDAKEIKRLIQLDQFMPKQRTGQNGAIPHQLHQQELDQIIEKQSKYYPFLAEPNPNVKRRKDAPYKLDELIAFKIPYYVGPLVTPEEQAQNGENVFAWMKRKAAGPITPWNFDEKVDRMESANRFIRRMTTKDTYLFGEDVLPAESMIYQKFVVLNELNNLKINGRHLSLKDKQDVYNDLFKQQKTVSIKALQNYYVTKKKAATAPTVGGLADPKKFLSSLSTYIDFKNMFGERVNDPQFQEDLEQIVEWSTIFEDRGIFKAKLQALGWLSEKQIQQLVAKRYKGWGRLSKKLLTGLKNAEGYSILDEMWRSTGNFMQIQSRPEFAALIQQANEKQFEGNDPDNVWENIENILGDAYTSPQNKKAIRQVVKVVQDIEKAVGNPPEKIAIEFTREAAANPQRTQSRLRTLEKLYESAEEVVDAGLTAELAEFKENKHVLSDKYYLYFTQLGRDVYTGDTISLDKLNDYDVDHILPQSFIKDDSLDNRVLTIRAVNNGKSDNVPAKMFGKKMGSFWRYLLDNGMISKRKYNNLITDPDNISKYAQKGFINRQLVETSQVIKLTANILNGIYDKDTEIIEVPAKMNSQMRKMFDLVKVREVNDYHHAFDAYLTIFIGNYLYKCYPKLQPYFVYDNFKKFGNKEDIGHKRFNFLGKIEREKKVVAPETGEILWSNVAPNETIKQIKKVYDYKFMIVSREITTRRAELFNQTVYPKNYHGKLIPIKEDRPTDLYGGYSGNTDAYLAIVALEDKKKGKYFKVVGIPTRVAAKLEKLKQQDSQQYLQALHKVIAPQFTKSTKKGIKKTEFEIVLDKVHYRQLVQDGPVKMMLGSSTYKYNAKQLVLSEKALQVIADDRKFDETQKDDNLIAVYDEILSIVNQSFDLYDINGFRKKLNDNRDQFIDLPAETKYEGRKVVAHGKREMILEILKGLHANAAFGNLKPIGFSTAFGQLQVPNGIILSKNAILIHQSPSGLFERKIKLSDL

SEQ ID NO: 168 - protein, 1364 aa, Peptoniphilus duerdenii
MKNLKEYYIGLDIGTASVGWAVTDESYNIPKFNGKKMWGVRLFDDAKTAEERRTQRGSRRRLNRRKERINLLQDLFATEISKVDPNFFLRLDNSDLYREDKDEKLKSKYTLFNDKDFKDRDYHKKYPTIHHLIMDLIEDEGKKDIRLLYLACHYLLKNRGHFIFEGQKFDTKNSFDKSINDLKIHLRDEYNIDLEFNNEDLIEIITDTTLNKTNKKKELKNIVGDTKFLKAISAIMIGSSQKLVDLFEDGEFEETTVKSVDFSTTAFDDKYSEYEEALGDTISLLNILKSIYDSSILENLLKDADKSKDGNKYISKAFVKKFNKHGKDLKTLKRIIKKYLPSEYANIFRNKSINDNYVAYTKSNITSNKRTKASKFTKQEDFYKFIKKHLDTIKETKLNSSENEDLKLIDEMLTDIEFKTFIPKLKSSDNGVIPYQLKLMELKKILDNQSKYYDFLNESDEYGTVKDKVESIMEFRIPYYVGPLNPDSKYAWIKRENTKITPWNFKDIVDLDSSREEFIDRLIGRCTYLKEEKVLPKASLIYNEFMVLNELNNLKLNEFLITEEMKKAIFEELFKTKKKVTLKAVSNLLKKEFNLTGDILLSGTDGDFKQGLNSYIDFKNIIGDKVDRDDYRIKIEEIIKLIVLYEDDKTYLKKKIKSAYKNDFTDDEIKKIAALNYKDWGRLSKRFLTGIEGVDKTTGEKGSIIYFMREYNLNLMELMSGHYTFTEEVEKLNPVENRELCYEMVDELYLSPSVKRMLWQSLRVVDEIKRIIGKDPKKIFIEMARAKEAKNSRKESRKNKLLEFYKFGKKAFINEIGEERYNYLLNEINSEEESKFRWDNLYLYYTQLGRCMYSLEPIDLADLKSNNIYDQDHIYPKSKIYDDSLENRVLVKKNLNHEKGNQYPIPEKVLNKNAYGFWKILFDKGLIGQKKYTRLTRRTPFEERELAEFIERQIVETRQATKETANLLKNICQDSEIVYSKAENASRFRQEFDIIKCRTVNDLHHMHDAYLNIVVGNVYNTKFTKNPLNFIKDKDNVRSYNLENMFKYDVVRGSYTAWIADDSEGNVKAATIKKVKRELEGKNYRFTRMSYIGTGGLYDQNLMRKGKGQIPQKENTNKSNIEKYGGYNKASSAYFALIESDGKAGRERTLETIPIMVYNQEKYGNTEAVDKYLKDNLELQDPKILKDKIKINSLIKLDGFLYNIKGKTGDSLSIAGSVQLIVNKEEQKLIKKMDKFLVKKKDNKDIKVTSFDNIKEEELIKLYKTLSDKLNNGIYSNKRNNQAKNISEALDKFKEISIEEKIDVLNQIILLFQSYNNGCNLKSIGLSAKTGVVFIPKKLNYKECKLINQSITGLFENEVDLLNL

SEQ ID NO: 169 - protein, 1089 aa, Corynebacterium matruchotii
MNSANVNYRVGIDVGSYSLGMAAIAIDDDGKPTEILSAISLIHDSGVDPDSAKSAATRLATSGIARRTRRLYRRKRKRLAKLDKFISSQGWPLKEFEKYEDPFYPWRVRAELATTAITDQQELGEKLSIALRHIARHRGWRNPYSKVTALYTVTEPSDAFLAMQEECAKQLGRTIPETITVGQLVTGMNLGKTRLRGENSLLAARPRQSDNANEIHTIAKVQGLSNELVRQIIDHVFAAESPKGSAAEQVGKDPLQPTKKRALKASDAFQQYRIAALIGNLRIRGGKGNRRLTTEETRLVFDYLRSLPAKQEPTWQLVAEQLKIDRGNLVGTAIMTDDGERAGAKPPVHDTNRIMENTKIKPLATWWKSADADARAAMVKALSNAEVDDFDSQAGAQVQEFFFGISDEDQEKLDGLHLPIGRAAYSEDTLDRLTKRMIGEGMDLYEARQAEFKISNDWAPPAPEIGERVGNPAVDRVLKATARWLNAAERQWGAPKSVNIEHVRAAFMSESSARELDRDNQQRAKRNVKVVAEMQEKLGIEGRPSRADVWRFQSIQRQNGKCAYCGAEISFKNSEMDHIIPQAGEGSTNTRDNLVAVCRECNSSKSNIAFAVWAENTSRPGVSVQKAIERTHHWVTDSGLRKPEFDKFRKQVCDRLRRKATDEPIDARSLESVAWMANELRSRIAQKFKDGDTKVRVYKGALTAEARRASGISGKLEFVDGKGKSRLDRRHHAVDAAVVAFTSNYVAETLALRSNMKFDQELRRKAPQWREFTGSDHVHQVEWTKWKYRMQALAELLNNALVQDRIVVMHNLRLRLGNGAAHEDTIGKLTRLKVGDAISTTDIDRASSEALWCALTRDPDYDPKTGLPENPNRTIRIHGTHLTASDEITVFPVAAASIPIRDGFAKLGSNYHHVRLFRVPSGKKYKYCLMQVYTVDLLKFRKEDLFTVELKPQTISVRTCEALLRKALANGTAEYLGWLVSDDELLIDTSSFDTPGIVKLREEYGPVNRWRLAGLTSVTRLNLRPLYLSKEGLKPNVNPEIKKIIDNRSWIITVNKLFSSGHVKIIRRDALGRPRLHSAAHLPICWEVK

SEQ ID NO: 170 - protein, 1134 aa, Streptococcus mitis
MNGLVLGLDIGIASEGVGILEKNSGKIIHANSRLFPAATADNNVERRKNRQARRLNRRKKHRGVRFQDLFEDYGLLTDFSKVSINLNPYRLRVDGLNQQLTNEELFIALKNIVKRRGISYLDDASEDGGAVSSDYGKAVEENRKLLAEQTPGQIQLERFEKYGQVRGDFTVVENGEKLRLINVFSTSAYKKEAERILRKQQEFNNQITDEFIEDYLKILTGKRKYYHGPGNEKSRTDYGRFRTDGTTLDNIFGILIGKCTFYPEEYRASKASYTAQEFNLLNDLNNLTVPTETKKLSEEQKKVIVEYAKEAKTLGASTLLKYIAKMIDASVDQIRGYRVDVNNKPEMHTFEVYRKMQSLETISVGELSRNVLDELAHILTLNTEREGMEEAINTKLKDSFSQDQVLELVQFRKNNSSLFSKGWHNFSLKLMMELIPELYETSEEQMTILTRLGKQKSKETSKRTKYIDEKELTEEIYNPVVAKSVRQAIKIINEATKKHGIFDNIVIEMARENNEEDAKKDYIKRQKANQDEKNAAMEKAAFQYNGKKELPDNIFHGHKELATKIRLWHQQGEKCLYTGKTIPISDLIYNQYKYEIDHILPLSLSFDDSLSNKVLALATANQEKGQRTPFQALDSMDDAWSYREFKSYVKDLKSLSNKKKDYLLTEEDISKIEVKQKFIERNLVDTRYSSRVVLNALQDFYKSHQFDTTISVVRGQFTSQLRRKWGLEKSRETYHHHAVDALIIAASSQLRLWKKQNNPLITYKEGQFVDSQTGEIISLTDDEYKELVFKAPYDHFVDTLSSKTFEDSILFSYQVDSKFNRKISDATIYATRKAKLDKEKKEYTYTLGKIKDIYSLGTKTPSKTGFYKFLDLYNKDKSQFLMFQKDRKTWDEVIEKIMEQYRPFKEYDKTGKLVDFNPFEKYRQENEPIRKYSKKGNGPEIKSLKYYDILLGKHKNITPEGSRNTVALLSLNPWRTDVYYNMETKKYEFLGLKYADLPFEEGGAYGISTETYNELREKEGIGKNSEFKFTLYKNDLILIKDTETNCQQIFRFWSRTGKDNPKSFEKHKIELKPYEKARFEKGEELEVLGKVPPSSNQLQKNMQIENLSIYKVKTDVLGNKHFIKKEGDKPKLKF

SEQ ID NO: 171 - protein, 1373 aa, Streptococcus bovis
MTKKNYSIGLDIGTNSVGWAVITDDYKVPAKKMKVLGNTDKKYIKKNLLGALLFDSGETAEATRLKRTARRRYTRRKNRLRYLQEIFAEEMTKVDESFFQRLDESFLRWDDDNKKLGRYPIFGNKADVVKYHQEFPTIYHLRKHLADSSEKADLRLVYLALAHMIKFRGHFLIEGELNAENTDVQKIFADFVGVYDRTFDDSHLSEITVDAASILTEKISKSRRLENLIKYYPTEKKNTLFGNLIALALGLQPNFKMNFKLSEDAKLQFSKDSYEEDLGELLGKIGDDYADLFTSAKNLYDAILLSGILIVDDNSTKAPLSASMIKRYVEHQEDLEKLKEFIKANKSELYHDIFKDKNKNGYAGYIENGVKQDEFYKYLKNTLSKIAGSDYFLDKIEREDFLRKQRTFDNGSIPHQIHLQEMHAILRRQGDYYPFLKENQDRIEKILTFRIPYYVGPLARKDSRFSWAEYHSDEKITPWNFDKVIDKEKSAEKFITRMTLNDLYLPEEKVLPKHSHVYETYAVYNELTKIKYVNEQGKDSFFDSNMKQEIFDHVFKENRKVTKEKLLNYLNKEFPEYRIKDLIGLDKENKSFNASLGTYHDLKKILDKAFLDDKVNEEVIEDIIKTLTLFEDKDMIHERLQKYSDIFTADQLKKLERRHYTGWGRLSYKLINGIRNKENNKTILDYLIDDGSANRNFMQLINDDTLPFKQIIQKSQVVGDVDDIEAVVHDLPGSPAIKKGILQSVKIVDELVKVMGDNPDNIVIEMARENQTTNRGRSQSQQRLKKLQNSLKELGSNILNEEKPSYIEDKVENSHLQNDQLFLYYIQNGKDMYTGDELDIDHLSDYDIDHIIPQAFIKDDSIDNRVLTSSAKNRGKSDDVPSLDIVRARKAEWVRLYKSGLISKRKFDNLTKAERGGLTEADKAGFIKRQLVETRQITKHVAQILDARFNTESDENDKVIRDVKVITLKSNLVSQFRKDFEFYKVREINDYHHAHDAYLNAVVGTALLKKYPKLASEFVYGEYKKYDIRKFITNSSDKATAKYFFYSNLMNFFKRVIRYSNGKVIVRPVVEYSKDTEDIAWDKKSNFRTICKVLSYPQVNIVKKVETQTGGFSKESILPKGDSDKLIPRKTKKAYWDTKKYGGFDSPTVAYSVFVVADVEKGKAKKLKTVKELVGISIMERSFFEENPVEFLENKGYHNIREDKLIKLPKYSLFEFEGGKRRLLASASELQKGNEMVIPGHLVKLLYHAQRINSFNSTKYLDYVSAHKKEFEKVLSCVEDFANLYVDVEKNLSKIRAVADSMDNFSIEEISNSFINLLTLTALGAPADFNFLGEKIPRKRYTSTKECLNATLIHQSITGLYETRIDLSKIGEE

SEQ ID NO: 172 - protein, 1099 aa, Corynebacterium accolens
MSLLYRVGIDVGTYSLGCTAIEVDDNDQPVSILSSVSLIHDSGLDPDQQKRAVTRLASSGVARRTRRLYRRRRRRMVKLENFLTAQGWETLPFERYSDPYLPWHARVALVNGYISDDTQRGQYLSIAFRHIANHRGWRNPYWKVSSLYSPDKPSDAFEQIRKELEASTGRQIPETATVGQLISFAQFGKDRLRGGGKQKDKKKPQEQVNQAVISARLHQIDHAREINEICRVQKIDDTLRKQILDLVFAAESPKGAQKGRVGKDPLQPKLFRALKASDAFQQYRIAALTGNLRIYRNGVTVPLDRDEKLIVFNYLVNLPKKEEPSWLKIAEILNIDRGQLRGTATMTDDGERAGATPPVHDTNRTILDSKVKPLAHWWENASDDERAAMLKSLSNSEVEDFDSPAGAQVQAFFADLDETEQEKLDSLHLPMGRAAYSEDTLMRLTNRMLDENLDLYEARLAEFGIPKDWAPPAPRIGEPVGNPAVDRVLKGVARWLEAAADEWGAPKSVVIEHVRDGFVSKSKAIEIDRANNNRHKRNRELFQKMQENLGIEGKVRSSDLWRYQSVQRQNCQCAYCGSPITYTTCEMDHIVPRAGEGSTNTRDNLVATCHRCNLAKKNIPFAVWAEKSTIPGVSVKEALDRTRHWSEDSGMSKKDFQKFRKNVCERLNRTVVDEPLDARSMESVAWMANELRGRVAQRFQEENTTVNVYRGALTAEARRAAGITDKLRFIDGTGKSRLDRRHHAVDAAVVAFIHNYVAETLAIRSNKKREAQLLQGTSQWKEFTGSDDKHRAVWNAWIPKMQKLAVLLQIALDEDRIVVTSNLRLRLGNGRAHEDTISELKTIRVGDAISVTDIDRASSEALWCALTREPDFDEKDGLPENPNRRIRVHGTWYDAEDEIEVFPVGAGAIKVRGGYAKLSRFHHARVYKIPGKKAPIYCMLRVYNTDLVQHRHEDLFSVELKPQTMSVRQAEPKLRKALAENTAEYLGWLVTDDELIIDTSTFRTGLIEEMQSEFGLVRRWRLDGFDSPSLLTLRPLHMSAEGLPDDCALGSRKIIDTKGWRVSINKVFNAGNTTVVRRDALGRARLTSNAHLPISWKEE

SEQ ID NO: 173 - protein, 1054 aa, Actinobacillus pleuropneumoniae
MKLTPLNYILGLDLGIASVGWAVVEIDEQENPLGLIDVGVRTFDRAEVAKTGESLALARRLARSSRRLVKRRADRIKKVKRLLKSENILLSADEQLPNDVWQLRVKGLDQKLERQEWAAVLLHLLKHRGYLSQRKNESKSENKELGALRSGVAANHQILQSAEYRTPAEIAVKKFHVEEGHIRNQRGAYTHTFSRLDLLAEIELLFTRQTELGNPHTSAKLLENLTALLMWQKPALAGEAILKMLGKCTFEPTEYKAAKNSYSAERFVWLTKLNNLRILEQGAERALTDNERFALLDQPYEKAKFTYAQARTMLALPDEAIFKGVRYQGEDKKAVETKTILMEMKAYHQIRKALENADLKAEWNELKNNSELLDDIGTAFSLHKTDEDICRYLDGKLSESILNALLENLNFDKFIQLSLKALQQILPLMLQGQRYDEAVSAIYGDHYGKKSAEINRLLPTIPADEIRNPVVLRTLTQARKVINAVVRLYGSPARIHIETGREVGKSYQDRKKLEKQQEDNRKHRESAVQKFKEYFPNFVGEPKGKDILKMRLYELQQAKCLYSGKSLELHRLLEKGYVEVDHALPFSRTWDDSFNNKVLVLANENQNKGNLTPYEWLDGKNNSEPWQNFVARVQTSGFSHTKKQRILSHKLDEKGFIERNLNDTRYVVRFLCNFIADNMLLTGKGKRKVFASNGQITALLRGRWGLQKVRDDNDRHHALDAVVVACSTVAMQQKITRFVRYEEGNVFSGERIDRETGEIIPLHFPSPWAFFRENVEIRIFSENPKLELENRLPDYPQYNHEFVQPLFVSRMPTRKMTGQGHMETVKSAKRLDEGLSVLKVPLTQLKLNDLERMVNREREMALYESLKVRLEQFDNDPAKAFAEPFYKKGGALVKAVRVEQTQKSGVLVRDGNGVADNASMVRVDVFTKAGKYFLVPIYTWQVAKGILPNKAVTANVDEIDWLEMDESYQFIFTMYPNDLVKVKLKKEEFFGYYGGLDRATGAIVIKEHDLEKSKGRQGIYRIGVKLALSFEKYQVDELGKNIRPCRPTKRQHVR

SEQ ID NO: 174 - protein, 1369 aa, Lactobacillus iners
MNNNYYLGLDLGTNSVGWAVTDDHYNIIKFHGKHMWGMRLFEEAETAKDRRLHRQARRRRQRLVERINLLEELFDKEISKVDQGFFARKKESDLHFEDKTTKSEYALFNDKSYTDRDYYKQYPTIFHLIMDLIENDKKRDIRLVYLACHYLIKHRGHFIFDGKNFTVDNSFENLLDKLITYLKDNDDITLSFPKDQLINIFKNSNLNSTEKSDQLKPFFGRTNLEKGIIKLLSGGKQDLSNMFRDETLKNSNYKNLKFSDNRFDDERDGYAADLGDRIDLLILLKQIYDASILESMMSQARVSIDGHKYISSAKVCAYEKHKSDLKRLKSLIKKYLPSEYNNIFRKITEKDNYVAYSKSNITNNKREKALKYVKYVDFTKYLTKKLKTIKTQDAEDDQEIFEIKGELEKQSFLPKQRTLDNSIIPYQLHLMELKKILDNQSKYYDFLLAKDDQEGITVKDKIISLLTFRLPYYIGPVNPAVHGKFAWVKRLANGKVTPWNYKEKIDIDASHEEFIKTKLSKCSFLIGCDVLPKNSLLYQKYMVLSELNTIKFNGVNISEKLKDDIYQNLFKNIQKVTKKRLQNYIKEHENIIGDVIVTGIDNAFKQGLVSYLKFKKIIGDKVDDDRYQKVLEKIIRDITLYDECAGKKIKKEYKDSDLFTEDELNKIVKLTFNDWGRLSAELLDQLEGEDTVSGETGKIIEFMQKHNYNLMQLMSKKFTFKSKIDEINKSYYQHDKFNYKSMIDSLYVSPATKRILWQSLKVVHEISKIMKHDPEKIFIEMARSKEDHPKRKLSRKADLKQVYKDSKKQIISIIGKDKYQDLSNELDNKDDRDLRWDNLYLYYTQLGRSMYSLKPIDISELMNKNLYDQDHIFPKSKKYDDSIENRVLVEKELNVKKSDIYPISDANIIPQKIKGQVESFWKMLYDHKLIGDKKYARLIRSKAFTDDELAGFIARQLVETRQATKETADLLKRLCPKSRIVYAKAQNASIFRQKFDIPKSRTINDLHHAQDAYLNIVVGNIFDTKFTQDPRNFIKNTKDSRNYNLEKIYDYNVERNNYVAWIAPDGETNGTIANVKCNLSTKDFRVTRPSFYKKGALFNQNLSRKGSNLAPIKEHSPKSNPLKYGGYSGKNNSFFVVVAGKDNKGKDIVKLIPVNTLIYNKMLHCDYKAKQELLTSYVANNFAINNFRIVKDDIKMYSLVKIDGAYYYLVGGTDERIEVKNAMQLLLSKDSIKAVKILEKESKDQFANIKNYKDIDIKLGRTFNEVVSKYTNSVFGKSMLISDKYRKDIFKSVEKSILEFNHLDTIGKADNLLKFVTLMRPSGSAHSLKMVGLIERIRKSNVISNFNEFKLINQSVTGLFENEEDLLKL

SEQ ID NO: 175 - protein, 1420 aa, Bifidobacterium bifidum
MSRKNYVDDYAISLDIGNASVGWSAFTPNYRLVRAKGHELIGVRLFDPADTAESRRMARTTRRRYSRRRWRLRLLDALFDQALSEIDPSFLARRKYSWVHPDDENNADCWYGSVLFDSNEQDKRFYEKYPTIYHLRKALMEDDSQHDIREIYLAIHHMVKYRGNFLVEGTLESSNAFKEDELLKLLGRITRYEMSEGEQNSDIEQDDENKLVAPANGQLADALCATRGSRSMRVDNALEALSAVNDLSREQRAIVKAIFAGLEGNKLDLAKIFVSKEFSSENKKILGIYFNKSDYEEKCVQIVDSGLLDDEEREFLDRMQGQYNAIALKQLLGRSTSVSDSKCASYDAHRANWNLIKLQLRTKENEKDINENYGILVGWKIDSGQRKSVRGESAYENMRKKANVFFKKMIETSDLSETDKNRLIHDIEEDKLFPIQRDSDNGVIPHQLHQNELKQIIKKQGKYYPFLLDAFEKDGKQINKIEGLLTFRVPYFVGPLVVPEDLQKSDNSENHWMVRKKKGEITPWNFDEMVDKDASGRKFIERLVGTDSYLLGEPTLPKNSLLYQEYEVLNELNNVRLSVRTGNHWNDKRRMRLGREEKTLLCQRLFMKGQTVTKRTAENLLRKEYGRTYELSGLSDESKFTSSLSTYGKMCRIFGEKYVNEHRDLMEKIVELQTVFEDKETLLHQLRQLEGISEADCALLVNTHYTGWGRLSRKLLTTKAGECKISDDFAPRKHSIIEIMRAEDRNLMEIITDKQLGFSDWIEQENLGAENGSSLMEVVDDLRVSPKVKRGIIQSIRLIDDISKAVGKRPSRIFLELADDIQPSGRTISRKSRLQDLYRNANLGKEFKGIADELNACSDKDLQDDRLFLYYTQLGKDMYTGEELDLDRLSSAYDIDHIIPQAVTQNDSIDNRVLVARAENARKTDSFTYMPQIADRMRNFWQILLDNGLISRVKFERLTRQNEFSEREKERFVQRSLVETRQIMKNVATLMRQRYGNSAAVIGLNAELTKEMHRYLGFSHKNRDINDYHHAQDALCVGIAGQFAANRGFFADGEVSDGAQNSYNQYLRDYLRGYREKLSAEDRKQGRAFGFIVGSMRSQDEQKRVNPRTGEVVWSEEDKDYLRKVMNYRKMLVTQKVGDDFGALYDETRYAATDPKGIKGIPFDGAKQDTSLYGGFSSAKPAYAVLIESKGKTRLVNVTMQEYSLLGDRPSDDELRKVLAKKKSEYAKANILLRHVPKMQLIRYGGGLMVIKSAGELNNAQQLWLPYEEYCYFDDLSQGKGSLEKDDLKKLLDSILGSVQCLYPWHRFTEEELADLHVAFDKLPEDEKKNVITGIVSALHADAKTANLSIVGMTGSWRRMNNKSGYTFSDEDEFIFQSPSGLFEKRVTVGELKRKAKKEVNSKYRTNEKRLPTLSGASQP

SEQ ID NO: 176 - protein, 1092 aa, Ilyobacter polytropus
MKYSIGLDIGIASVGWSVINKDKERIEDMGVRIFQKAENPKDGSSLASSRREKRGSRRRNRRKKHRLDRIKNILCESGLVKKNEIEKIYKNAYLKSPWELRAKSLEAKISNKEIAQILLHIAKRRGFKSFRKTDRNADDTGKLLSGIQENKKIMEEKGYLTIGDMVAKDPKFNTHVRNKAGSYLFSFSRKLLEDEVRKIQAKQKELGNTHFTDDVLEKYIEVFNSQRNFDEGPSKPSPYYSEIGQIAKMIGNCTFESSEKRTAKNTWSGERFVFLQKLNNFRIVGLSGKRPLTEEERDIVEKEVYLKKEVRYEKLRKILYLKEEERFGDLNYSKDEKQDKKTEKTKFISLIGNYTIKKLNLSEKLKSEIEEDKSKLDKIIEILTFNKSDKTIESNLKKLELSREDIEILLSEEFSGTLNLSLKAIKKILPYLEKGLSYNEACEKADYDYKNNGIKFKRGELLPVVDKDLIANPVVLRAISQTRKVVNAIIRKYGTPHTIHVEVARDLAKSYDDRQTIIKENKKRELENEKTKKFISEEFGIKNVKGKLLLKYRLYQEQEGRCAYSRKELSLSEVILDESMTDIDHIIPYSRSMDDSYSNKVLVLSGENRKKSNLLPKEYFDRQGRDWDTFVLNVKAMKIHPRKKSNLLKEKFTREDNKDWKSRALNDTRYISRFVANYLENALEYRDDSPKKRVFMIPGQLTAQLRARWRLNKVRENGDLHHALDAAVVAVTDQKAINNISNISRYKELKNCKDVIPSIEYHADEETGEVYFEEVKDTRFPMPWSGFDLELQKRLESENPREEFYNLLSDKRYLGWFNYEEGFIEKLRPVFVSRMPNRGVKGQAHQETIRSSKKISNQIAVSKKPLNSIKLKDLEKMQGRDTDRKLYEALKNRLEEYDDKPEKAFAEPFYKPTNSGKRGPLVRGIKVEEKQNVGVYVNGGQASNGSMVRIDVFRKNGKFYTVPIYVHQTLLKELPNRAINGKPYKDWDLIDGSFEFLYSFYPNDLIEIEFGKSKSIKNDNKLTKTEIPEVNLSEVLGYYRGMDTSTGAATIDTQDGKIQMRIGIKTVKNIKKYQVDVLGNVYKVKREKRQTF

SEQ ID NO: 177 - protein, 994 aa, Streptococcus downei
MENQRGKRQRITHQEPYSIGLDIGTASVGSAVINNDLTVPQKRFKVRDINGNVIKTIKKNMSSVLIFDEANPAKGARTKRTSRRRYTRRNFRLLELKKLFEKEIEKIDPNFFHRIKEDSFFNWNDKEFDKHPLFGNLKEEKKFHNNYPTVFHLRNEIGKNSSKKFDLRLVYLALAHIIKYRGHFLDETFDPDASVSVEKRLNDFIVEYNELFDKDLRSEAKFSEILMSDSSNSVKIESTLSLYPSEKNTIFQVFLKLIVGNQGDFNKFFKDELESSSHSGKLVFSSDEVEDEKEELISIIGEDYLDIINLCQSLYSTVALAKIISTDTGESNTPLSASMVKRYNEHKGDLANLKGIVKHFIPEKYEEVFGEHSKTGYTAYIRNPNKMPEKKFYDYLYHEGEKGKISGILSDSRIYELPAVQKFILKIEQKSFLKKQRTKENGLIPYQLHLKELKIIIENQSEYYPFLHEIEEKLEKLLTFRIPYFVGPLAQTKYINPRFNWLVRKSEDHIKPWNFSEIVDEEKSATKFIEKLISNDQFLFGEKVLPKRSIIYQQFLIFNELTKVSYQIKDGPSRNFDSETKEEIFNSLFKKNKLGCVTVVDLKNYIKNDQCLSEKEDIQIEGIKKKFNSSYSTYADLSEISGLKELLDDDTQLDLVEEIIRILTVFEDKKMRTKQLEKLNLPANVDIEKLCKKHYKGWANVSRQLIDGIADRSRGFKKTILDYLKDDDIPNNDAFSTKVQKSLNRNFAQLITDKSLDFARKLDESYKIDVKKDYPSLVEDIPGSPAIRRAILQSLYTVDEIIGVMGRMPKNIVIEMARTNEVSDSPKTRKERIKKLIKETENDADALNFGISKVSEIFDEVKKDENLFKELEVYLYFLQEGKDMYGTETREGHRQPKEINFYDVKNSTGKYHIDHIIPQSLYSGNPLDNIVLTESTNNKIKDKDVPDEATVYEMKNFWLYLMKKGAISKKKFSFLTKIEQGGLSNEDKFGFINR

SEQ ID NO: 178 - protein, 1052 aa, Aminomonas paucivorans
MIGEHVRGGCLFDDHWTPNWGAFRLPNTVRTFTKAENPKDGSSLAEPRRQARGLRRRLRRKTQRLEDLRRLLAKEGVLSLSDLETLFRETPAKDPYQLRAEGLDRPLSFPEWVRVLYHITKHRGFQSNRRNPVEDGQERSRQEEEGKLLSGVGENERLLREGGYRTAGEMLARDPKFQDHRRNRAGDYSHTLSRSLLLEEARRLFQSQRTLGNPHASSNLEEAFLHLVAFQNPFASGEDIRNKAGHCSLEPDQIRAPRRSASAETFMLLQKTGNLRLIHRRTGEERPLTDKEREQIHLLAWKQEKVTHKTLRRHLEIPEEWLFTGLPYHRSGDKAEEKLFVHLAGIHEIRKALDKGPDPAVWDTLRSRRDLLDSIADTLTFYKNEDEILPRLESLGLSPENARALAPLSFSGTAHLSLSALGKLLPHLEEGKSYTQARADAGYAAPPPDRHPKLPPLEEADWRNPVVFRALTQTRKVVNALVRRYGPPWCIHLETARELSQPAKVRRRIETEQQANEKKKQQAEREFLDIVGTAPGPGDLLKMRLWREQGGFCPYCEEYLNPTRLAEPGYAEMDHILPYSRSLDNGWHNRVLVHGKDNRDKGNRTPFEAFGGDTARWDRLVAWVQASHLSAPKKRNLLREDFGEEAERELKDRNLTDTRFITKTAATLLRDRLTFHPEAPKDPVMTLNGRLTAFLRKQWGLHKNRKNGDLHHALDAAVLAVASRSFVYRLSSHNAAWGELPRGREAENGFSLPYPAFRSEVLARLCPTREEILLRLDQGGVGYDEAFRNGLRPVFVSRAPSRRLRGKAHMETLRSPKWKDHPEGPRTASRIPLKDLNLEKLERMVGKDRDRKLYEALRERLAAFGGNGKKAFVAPFRKPCRSGEGPLVRSLRIFDSGYSGVELRDGGEVYAVADHESMVRVDVYAKKNRFYLVPVYVADVARGIVKNRAIVAHKSEEEWDLVDGSFDFRFSLFPGDLVEIEKKDGAYLGYYKSCHRGDGRLLLDRHDRMPRESDCGTFYVSTRKDVLSMSKYQVDPLGEIRLVGSEKPPFVL

SEQ ID NO: 179 - protein, 1023 aa, Helicobacter cinaedi
MKIYSFDIGVASIGWAFIENEVLQDCGIRIFTKAENPKNGASLALPRREARGVRKRLARRRGRLNTIKQLLCKEFGLQLEDYLSNDGELPKAYTASKANPLKSPYELRTLALSQKLDSKDLVRVILHIAKHRGYGNKHAKDSKDTESGKVKKAIEFNRKTLAEKGYRSVGEYLYREFFQQSRISQNNGATEFINVRNKAGNYEHCVAQDMLKEELESILNAQRQFGFSLKQDFENKLLTKIFEQRPLKSFADKVGNCCFIAGEKRAPKDSPSAIEFIALSRTINTLINLSKESGEIYNRAIILQIVESTLKKGEISYKELREIIRLDERLRFKDPRLDYSREIKEAEKVKFLEFKQLKGFKKALGESFTTLAISQLDEIAEHIALIKDRVKLNEKLESYALTKEQREALSNLSFSAHINLSLQALKQILPFMRGDNGEQCLDYDESVEKAGLKALSKDTLKGQMLPPLNEFEPYLSNPVVARALAEYRKVLNVLLKQYGSPHKIHIEYAREAKLSSTERQKYEKEQKDNYAANQAAHKKCQELGLEPSSTNLLKLKLWQEQGGLCLYSGAKITISYLQDPTALQVDHIYPYSRSFDDSYMNKCLVLTKANQEKGNRTPFEAFGTDSAKWGVITTLAQKLPHKKRRRILNTAFNDKEAGFKLRNLNDTSYIARLVADYTETYLEFLPLVESENTTLSKGQKGSKKHIAIVNGVLTSTMRYYLGFASKDRDNHLHHALDAVIIGFMNDSVIKAFSDFKKTQETSKAAYYAHTLSKQEYKKQRAFIQLPSGENFRVSVLEKVESVFVSKPPRKRVRGALHEATFYSPNDPKLLKNYGGTKGVERALALGKMRKVGAKIVSNGAMVRVDIFRHKSSGKFYGVPVYTMDFALGILPNKAVVVGKDQNGVIKDWLEMDSSYEFIFSLYKDDVILVQKKEMQRPELCYFVSFDTSGASIKVAKHDNNFSTLTENQKLLFSNATKEEVVGKSIGIQNLKVFEKWQVSVLGEVKRTQSYPRENISLASKAKK

SEQ ID NO: 180 - protein, 874 aa, Listeria seeligeri
LANGQSEFSWLTRKADGEIRPWNIEEKVDFGKSAIDFIEKMTNKDTYLPKENVLPKHSMCYQKYMVYNELTKIRYTDDQGKTHYFSGQEKQQIFNDLFKQKRKVKKKDLELFLYNMNHVESPTVEGVEDAFNSSFTTYHDLQKVGVPQEILDDPLNTEMLEEIIKILTVFEDKRMINERLQEFSNVLDEAVLKKLERRHYTGWGRLSAKLLIGIRDKESHLTILDYLMNDDKHNRNLMQLINDSNLSFKSIIEKEQVSTADKDIQSIVADLAGSPAIKKGILQSLKIVDELVGIMGYPPQTIVVEMARENQTTGKGKNNSKPRFTSLEKAIKELGSQILKEHPTDNQGLKNDRLYLYYLQNGKDMYTGQELDIHNLSNYDIDHVVPQSFITDNSIDNRVLASSAANREKGDNVPSLEVVRKRKVYWEKLYQAKLMSKRKFDYLTKAERGGLTEADKARFIHRQLVETRQITKNVANILHQRFNCKKDESGNVIEQVRIVTLKAALVSQFRKQFQLYKVREVNDYHHAHDAYLNCVVANTLLKVYPQLEPEFVYGDYHQFDWFKANKATAKKQFYTNIMLFFAKKDRIIDENGEILWDKKYLDTIKKVLNYRQMNIVKKTEIQKGEFSNATANPKGNSSKLIPRKADWDPIKYGGFDGSNMAYAIVIEHEKRKKKTVIKKELIQINIMERTAFEKDQKEFLEGKGYRNPKVITKIPKYTLYECENGRRRMLGSANEAQKGNQMVLPNHLMTLLYHAKNCEASDGKSLAYIESHREMFAELLDSISEFASRYTLADANLEKINTIFEQNKSGDVKVIAQSFVNLLEFNAMGAPASFKYFETNIERKRYNNLKELLNATIIYQSITGLYEARKRLDD

SEQ ID NO: 181 - protein, 1082 aa, Neisseria lactamica
MAAFKPNPMNYILGLDIGIASVGWAMVEIDKEENPIRLIDLGVRVFERAEVPKTGDSLAMARRLARSVRRLTRRRAHRLLRARRLLKREGVLQDADFDENGLVKSLPNTPWQLRAAALDRKLTCLEWSAVLLHLIKHRGYLSQRKNEGETADKELGALLKGVADNAHALQTGDFRTPAELALNKFEKESGHIRNQRGDYSHTFSRKDLQAELNLLFEKQKEFSNPHVSDSLKEGIETLLMAQRPALSGDAVQKMLGHCTFEPAEPKAAKNTYTAERFIWLTKLNNLRILEQGSERPLTDTERATLMDEPYRKSKLTYAQARKLLGLEDTAFFKGLRYGKDNAEAPTLMEMKAYHAISRALEKEGLKDKKSPLNLSTELQDEIGTAFSLFKTDKDITGRLKDRVQPEILEALLKHISFDKFVQISLKALRRIVPLMEQGKRYDEACAEIYGDHYCKKNAEEKIYLPPIPADEIRNPVVLRALSQARKVINCVVRRYGSPARIHIETAREVGKSFKDRKEIEKRQEENRKDREKAAAKFREYFPNFVGEPKSKDILKLRLYEQQHGKCLYSGKEINLVRLNEKGYVEIDHALPFSRTWDDSFNNKVLVLGSENQNKGNQTPYEYFNGKDNSREWQEFKARVETSRFPRSKKQRILLQKFDEEGFKERNLNDTRYVNRFLCQFVADHILLTGKGKRRVFASNGQITNLLRGFWGLRKVRAENDRHHALDAVVVACSTVAMQQKITRFVRYKEMNAFDGKTIDKETGEVLHQKAHFPQPWEFFAQEVMIRVFGKPDGKPEFEEADTPEKLRTLLAEKLSSRPEAVHEYVTPLFVSRAPNRKMSGQGHMETVKSAKRLDEGISVLRVPLTQLKLKGLEKMVNREREPKLYDALKAQLETHKDNPAKAFAEPFYKYDKAGNRTQQVKAVRIEQVQKTGVWVRNHNGIADNATMVRVDVFEKGGKYYLVPIYSWQVAKGILPDRAVVAFKDEEDWTVMDDSFEFRFVLYANDLIKLTAKKNEFLGYFVSLNRATGAIDIRTHDTDSTKGKNGIFQSVGVKTALSFQKNQIDELGKEIRPCRLKKRPPVR

SEQ ID NO: 182 - protein, 1326 aa, Streptococcus pseudoporcinus
MLGTVLFDSGETAQARRLKRTNRRRYTRRRYRLCQLQNIFATEMVKVDDTFFQRLSESFFYYQDKAFDKHPIFGNSKEERAYHKTYPTIYHLRKDLADRDQKADLRLIYLALSHIIKFRGHFLIEGKLNSENTDVQKLFIALVTVYNLLFEEEPIAGETCDAKALLTAKTSKSKRLESLISEFPGQKKNGLFGNLLALALGLRPNFKSNFGLSEDAKLQITKDTYEEELDNLLAEIGDHYADLFLAAKNLSDAILLSDILTLSDENTRAPLSASMIKRYEEHQEDLALLKKLVKEQMPEKYWEIFSNAKKNGYAGYIEGKVSQEDFYRYIKPILSRLKGGDEFLAKIDRDDFLRKQRTFDNGSIPHQIHLKELHAILRRQEKYYPFLAEQKEKIEQLLCFRIPYYVGPLAKGGNSSFAWLKRRSDEPITPWNFKDVVDEEASAQAFIEGMTNYDTYLPEEKVLPKHSPLYEMFTVYNELTKVKYIAENMTKPLYLSAEQKEAIIDHLFKQTRKVTVKDLKEKYFSQIEGLENVDVTGVEGAFNASLGTYNDLLKIIKDKAFLDDEANAEILEEIVLILTLFQDEKLIEKRLAKYANLFEKSVLKKLRKRHYRGWGRLSRQLIDGMKDKASGKTILDFLKADDFANRNFIQLINDSSLDFEKLIDDAQKKAIKRESLTEAVANLAGSPAIKKGILQSLKVVDEIVKVMGHNPDNIVIEMSRENQTTAQGLKNARQRLKKIKEVHKKTGSRILEDNSERITNLTLQDNRLYLYLLQDGKDMYTGQDLDINNLSQYDIDHIIPQSFIKDNSIDNLVLTTQKANRGKSDNVPSIEVVRDMKDRVWRRQLANGAISRQKFDHLTKAERGGLADSDKARFLRRQLVETRQITKHVAQLLDSRFNSKSNQNKKLARNVKIITLKSKIVSDFRKDFGLYKLREVNNYHHAHDAYLNAVVGTALLKKYPKLEAEFVYGDYKHFDLVKLISKSDPSLGKATAKVFFYSNIMNFFKEELSLADGTLMKRPVIETNTETGEVVWDKVKDFKTIRKVLSYPQVNIVKKTEIQSGAFSKESVLSKGNSDKLIERKKGWDPKKYGGFDSPNTAYSIFVVAKVAKRKAQKLKTVKEIVGITIMEQAEYEKDNIAFLEKKGYQDIQEKLLIKLPKYSLFELENGRRRLLASANEFQKGNELALSGKYMKFLYLASRYDKLSSKIESEQQKKLFVEQHLHYFDEILDIVVKHATCYIKAENNLKKIISLYKKKEAYSINEQALNMLNLFIFTSLGAPSTFVFFDETIDRKRYTTSSDVLNGILIQQSITGLYETRIDLSRFGGD

SEQ ID NO: 183 - protein, 1150 aa, Enterococcus faecalis
MYSIGLDLGISSVGWSVIDERTGNVIDLGVRLFSAKNSEKNLERRTNRGGRRLIRRKTNRLKDAKKILAAVGFYEDKSLKNSCPYQLRVKGLTEPLSRGEIYKVTLHILKKRGISYLDEVDTEAAKESQDYKEQVRKNAQLLTKYTPGQIQLQRLKENNRVKTGINAQGNYQLNVFKVSAYANELATILKTQQAFYPNELTDDWIALFVQPGIAEEAGLIYRKRPYYHGPGNEANNSPYGRWSDFQKTGEPATNIFDKLIGKDFQGELRASGLSLSAQQYNLLNDLTNLKIDGEVPLSSEQKEYILTELMTKEFTRFGVNDVVKLLGVKKERLSGWRLDKKGKPEIHTLKGYRNWRKIFAEAGIDLATLPTETIDCLAKVLTLNTEREGIENTLAFELPELSESVKLLVLDRYKELSQSISTQSWHRFSLKTLHLLIPELMNATSEQNTLLEQFQLKSDVRKRYSEYKKLPTKDVLAEIYNPTVNKTVSQAFKVIDALLVKYGKEQIRYITIEMPRDDNEEDEKKRIKELHAKNSQRKNDSQSYFMQKSGWSQEKFQTTIQKNRRFLAKLLYYYEQDGICAYTGLPISPELLVSDSTEIDHIIPISISLDDSINNKVLVLSKANQVKGQQTPYDAWMDGSFKKINGKFSNWDDYQKWVESRHFSHKKENNLLETRNIFDSEQVEKFLARNLNDTRYASRLVLNTLQSFFTNQETKVRVVNGSFTHTLRKKWGADLDKTRETHHHHAVDATLCAVTSFVKVSRYHYAVKEETGEKVMREIDFETGEIVNEMSYWEFKKSKKYERKTYQVKWPNFREQLKPVNLHPRIKFSHQVDRKANRKLSDATIYSVREKTEVKTLKSGKQKITTDEYTIGKIKDIYTLDGWEAFKKKQDKLLMKDLDEKTYERLLSIAETTPDFQEVEEKNGKVKRVKRSPFAVYCEENDIPAIQKYAKKNNGPLIRSLKYYDGKLNKHINITKDSQGRPVEKTKNGRKVTLQSLKPYRYDIYQDLETKAYYTVQLYYSDLRFVEGKYGITEKEYMKKVAEQTKGQVVRFCFSLQKNDGLEIEWKDSQRYDVRFYNFQSANSINFKGLEQEMMPAENQFKQKPYNNGAINLNIAKYGKEGKKLRKFNTDILGKKHYLFYEKEPKNIIK

SEQ ID NO: 184 - protein, 1150 aa, Enterococcus faecalis
MYSIGLDLGVSSVGWSVIDERTGNVIDLGVRLFSAKNSEKNLERRTNRGGRRLIRRKTNRLKDAKKILAAVGFYEDKSLKNSCPYQLRVKGLTEPLSKGEIYKVTLHILKKRGISYLDEDDTEAAKESQDYKEQVRENAQLLTKYTPGQIQLQRLKENNRVKTGINAQGNYQLNVFKVSAYANELATILKTQQAFYPNELTDDWIALFVQPGIAEEAGLIYRKRPYYHGPGNEANNSPYGRWSDFKKTGQPATNIFDKLIGKDFQGELRASGLSLSAQQYNLLNDLTNLKIDGEIPLSPEQKEYILAELMTKEFTRFGINDVAKLLGVKKERLSGWRLDKKGKPEIHTLKGYRNWRKIFAESGIDLATLPTETIDCLAKVLTLNTEREGIENTLAFELPELAESVKLLVLDRYKELSQSVSTQAWHRFSLKTLHLLIPELMNATSEQNTLLEQFQLKSDVRKRYSEYKKLPTKDVLTEIYNPTVNKTVSQAFKVIDALLVKYGKEQIRYITIEMPRDDNEEDEKKRIKELHAKNSQRKNDSQSYFMQKSGWSQEKFQTTIQKNRRFLAKLLYYYEQDGICAYTGLSISPELLVSDSTEIDHIIPISISLDDSINNKVLVLSKANQVKGQQTPYDAWMDGSFKKINGKFSNWDDYQKWVESRHFSHKKENNLLETRNIFDSEQVEKFLARNLNDTRYASRLVLNTLQSFFANQETKVRVVNGSFTHTLRKKWGADLDKTRETHHHHAVDATLCAVTPFVKVSRYHYAVKEETGEKVMREIDFETGEIVDEMSYREFKKSKKYERKTYQVKWPNFREQLKPVNLHPRIKFSHQVDRKANRKLSDATIYSVREKTEVKTLKSGKQKITTDEYTIGKIKDIYTVDGWEAFKKKQDKLLMKDLDEKTYERLLSIAETTPDFQEVEEKNGKVKRVKRSPFAVYCEENDIPAIRKYAKNNNGPLIRSLKYYDGKLNKHINITKDSQGRPVEKTKNGRKVTLQSLKPYRYDIYQDLETKAYYTVQLYYSDLRFVEGKYGITEKEYMKKVAEQTKGQVVRFCFSLQKNDGLEIEWKDSQCYDVRFYNFQSANSINFKGLEQEMMPAENQFKQKPYNNGAINLNIAKYGKEGKKLRKFNTDILGKKHYLYYEKEPKNIIK

SEQ ID NO: 185 - protein, 1345 aa, Streptococcus anginosus
MDQKYSIGLDIGTNSVGWAVVTDDYKVPAKKMKVLGNTDKQSIKKNLLGALLFDSGETAEATRLKRTARRRYTRRRNRLRYLQEIFAEEMNKVDENFFQRLDDSFLVDEDKRGERHPIFGNIAAEVKYHDDFPTIYHLRKHLADISQKADLRLVYLALAHMIKFRGHFLIEGQLKAENTNVQALFKDFVEVYDKTVEESHLSEMTVDALSILTEKVSKSRRLENLIAHYPAEKKNTLFGNLIALSLGLQPNFKTNFQLSEDAKLQFSKDTYEEDLEGLLGEIGDEYADLFASAKNLYDAILLSGILTVDDNSTKAPLSASMVKRYEEHQKDLKKLKDFIKVNAPDQYNAIFKDKNKKGYAGYIENGVKQDEFYKYLKGILLQINGSGDFLDKIDREDFLRKQRTFDNGSIPHQIHLQEMHAILRRQEEHYPFLKENQDKIEKILTFRIPYYVGPLARKGSRFAWAEYKADEKITPWNFDDILDKEKSAEKFITRMTLNDLYLPEEKVLPKHSLLYETFTVYNELTKVKYVNEQGEAKFFDANMKQEIFDHVFKENRKVTKDKLLNYLNKEFEEFRIVNLTGLDKENKAFNSSLGTYHDLRKILDKSFLDDKANEKTIEDIIQTLTLFEDREMIRQRLQKYSDIFTKAQLKKLERRHYTGWGRLSYKLINGIRNKENKKTILDYLIDDGYANRNFMQLINDDALSFKEEIARAQIIGDVDDIANVVHDLPGSPAIKKGILQSVKIVDELVKVMGHNPANIIIEMARENQMTDKGRRNSQQRLKLLQDSLKNLDNPVNIKNVENQQLQNDRLFLYYIQNGKDMYTGETLDINNLSQYDIDHIIPQAFIKDNSLDNRVLTRSDKNRGKSDDVPSIEVVHEMKSFWSKLLSVKLITQRKFDNLTKAERGGLTEEDKAGFIKRQLVETRQITKHVAQILDERFNTEFDGNKRRIRNVKIITLKSNLVSNFRKEFELYKVREINDYHHAHDAYLNAVVGNALLLKYPQLEPEFVYGEYPKYNSYRSRKSATEKFLFYSNILRFFKKEDIQTNEDGEIAWNKEKHIKILRKVLSYPQVNIVKKTEEQTGGFSKESILPKGESDKLIPRKTKNSYWNPKKYGGFDSPVVAYSILVFADVEKGKSKKLRKVQDMVGITIMEKKRFEKHPVDFLEQRGYRNVRLEKIIKLPKYSLFELENKRRRLLASARELQKGNELVIPQRFTTLLYHSYQIEKNYEPEHREYVEKHKDEFKELLEYISVFSRKYVLADNNLTKIEMLFSKNKDAEVSSLAKSFISLLTFTAFGAPAAFNFFGENIDRKRYTSVTECLNATLIHQSITGLYETRIDLSKLGED

SEQ ID NO: 186 - protein, 849 aa, Listeria ivanovii
  misc_feature (780)..(780): Xaa can be any naturally occurring amino acid
LIDKNGTPQHITMIDKMRGKCTYFPEEVRIAKMSYTAELFGLLNDFNNIYFADPETGEKIGFTEADKKYFIDTFIHDQKGVKNITLKQIMKHKNIINETDIFGYRINTKNGTPIFTEFKGLKALKKALKEVDLPDEFYQNTEMMDEIANILSSEKSFTRREEQLKELFLAAFNDELEEAVKELINDITFKEFHSLSKKAIMVILPELWSTNQNQMQLFVQHKMDKSRLENLQNGTKIQFDDEAILSTIAKRAHRETIKIVDAVRAKYGELDYVIVEMAREKNSDEQKKVYNRAQKKQGDFEKEMCKLLGVSELKELRLNGKQHLALKFWKEQDGKCIYSGKPIALSDIVNNFNGLLEIDHIIPISISYDDSQQNKVLCLRSENQRKGQLSPYQYLIRGMGERSFDAFKAEVLSRHFGKKKQNYLLEMEDIANNDELRKHFINRNLVDTRYAMRTFSNTLKTFYTVNGIPTKVMPVNGAMTSALRKRAKLNKDRDAGHAHHAIDALIVAAIGRLPLIKQLAELRVNEEGEFADKITDKGLDDKTAFDDKTLKFLRNLLNYESKVKYSHKVDRKPNRSLSKQTLYSTREKDGEKYIIGKVKNIYTLDKAGYAALKKRIDKNPEDFLMAQHNPKTWEEIIKIMEVYSKADNPFKEFYDEHGFIMKDGKVPVKSLRYHDKKLGIHVPLTHKYENTRHDVVLLKRNSLRVDIYMNKEGVYKYQGVPYNWFNQKGDKYILDMEKYHNEIDGTRASFKNIDNTFEFQFSLYKNDVFSYMKKDKEGEXVSYTKLFRSDSSPRENRLEVENIDMRTSSQQMPTINPLKNLIKYNTDILGNTYPIQKEKFVTVFTLHSK

SEQ ID NO: 187 - protein, 1457 aa, Prevotella buccae
MKTILGLDLGTNSIGWAKVSVDDYGNYLHDIKLGSRIIPMSQDVLGNFDSGVTVSQTAQRTEFRSKRRLVQRNLQRRERLHRVLHVLDFLPAHYDAAIGWDRTEAVTYGKFLNHAEPKLAWEELGNGKRRFLFMDSFHEMVADFARCQPALVADGKKIPLDWTIYYLRKKALTQAITKEELAWILLNFNQKRGYYQLRGEEEEENPTKQEEYYELKVVSVEATDSRKGNDTWYNVHLENGWIYRRSSKISLDDWVGKVKQFIVTTEYEKDGATLKTDKEGYVKRSFRAPNENDWGLRKKRTETLLEMSGKTVGAFIYDHLLQEPADKIRGNFIRTIERHYYKAELEAILAEQCKYHIELRDKEMLEACARELYLNNLPHQRSLMKKDMTYLLLYDLIFYQRPLKSKKALIANCPYEYYEYVDKETGEIKRQNIKCIAKSNPYFQEFRLWQFVLNLRLFDRVEDKEVTANYLPTADDHARLFTYLNDRKEINQETLLKDYFKLKKVKIGNEKEYPIRWNYIEDKEKKYPCNETRYELLMALDRAGIEHKWLDDNNLEYRLWHLLYSVEVKSESETALRKLKNDDAFVNSFLKVKPFKKEYGAYSEKAIKRLLAVMRKGFLWNEQDICDETRKRIEIIIKGDVDEKVKERMGHAAYSFDRVSDFQGLPEWLACYVVYGRHSEAMDIQHWDSPERLMAYINNFKQYSLRNPIVEQCILETLRTVHDIWKETGQIDEIHVELGREMKSTSEERARRTQNVLRNENTNLRIKSLLIELKNDTDICNVHPYSPMQQEILRIYEEGALQELNREDEDFEEISKISQMSQPSGKELNRYKLWLEQKYRSPYTGKAISLAKLFTPAYQIEHVIPQSRYFDDSFTNKVICEAEVNTLKSNLLGYEFIKKHGGEIIHCTTLGDVRIFSESEYKAFVMDHYANNKSKKDKLLMEDIPQEFLSRQMNDSRYISKVVKTLLSNIVRMADESEATSKSVIVCTGGVTDRLKKDWGLNDVWNSIVYSRFERLNRLTGTEAFGHWENKDGKRVFQTSMPLELQRGFRKKRIDHRHHAMDALVIACASRNIVNYLNNESANNPKKREDLRRQLCDKNRVIRKPWETFTQDAYNALENVVVSFKNYVRVINKATNRYEHYDENGKKRFVQQKGSELWAIRKPMHKETYYGHVNLRRKELVTLQKALDDIPSICDKKLRDYISALVEKHFNKRQLLAHFKSTDYYWQKQYVNKVYVWTFSDDIKPLVATRKLLDTSFDAKRIGTITDTGIQKILRNYLEAKGGNATLAFTPEGIAEMNQNISKYNDGKPHQPILKVRITEPMGAKYRVGQTGNKMAKYVEAQSGTNLYFAIYEDSEGKRSYTTVPLDEVAERLKQRLSPVPEKDENDVPLKFYLSPNDLVYVPTEEELQLRECKLNKDRIYKMVSSTGNECHFIPYYVANVIYNKGGFNMQMHRPQS

SEQ ID NO: 188 - protein, 1330 aa, Enterococcus italicus
MKNDYTIGLDIGTNSVGYSVVTDDYKVISKKMNVFGNTEKKSIKKNFWGVRLFESGQTAQEARMKRTSRRRIARRKNRICYLQEIFQPEMNHLDNNFFYRLNESFLVADDAKYDKHPIFGTLDEEIHFHEQFPTIYHLRKYLADGDEKADLRLVYLAIAHIIKFRGNFLIEGELNTENNSVIELSKVFVQLYNQTLSELEGFQFIDESIDFSEVLTQQLSKSERADNVLKLFPDEKGTGIFAQFIKLIVGNQGNFKKVFQLEEDQKLQLSTDDYEENIENLLAIIGDEYGDIFVAAQNLYQAILLAGILTSTEKTRAKLSASMIQRYEEHAKDLKLLKRFVKEHIPDKYAEIFNDATKNGYAGYIDGKTKEEEFYKYLKTTLVQKSGYQYFIEKIEQENFLRKQRIYDNGVIPHQVHAEELRAILRKQEKYYSFLKENHEKIEQIFKVRIPYYVGPLAKHNEQSRFAWNIRKSDEPIRPWNMNDVVDENASAVAFIERMTIKDIYLNENVLPRHSLIYEKFTVFNELTKVLYADDRGVFQRFSAEEKEDIFEKLFKSERKVTKKKLENYLRIELSISSPSVKGIEEQFNANFGTYLDLKKFDELHPYLDDEKYQDTLEEVIKVLTVFEDRSMIQNQLEQLPLNLSTKTIKALSRRKYTGWGRLSARLIDGIHDKNSGKTILDYLIEDESDSYIVNRNFMQLINDDHLSFKKIIEDSQPYKEQQSAEEIVSELSGSPAIKKGILQSLKIVDELVAIMGYKPKNIVVEMARENQTTGRGKQNSKPRLKGIENGLKEFSDSVLKGSSIDNKQLQNDRLYLYYLQNGKDMYTGHELDIDHLSTYDIDHIIPQSFLTDNSIDNRVLTTSKSNRGKSDNVPSEEVVRKMDRFWRKLLNAKLISERKYTNLTKKELTESDKAGFLKRQLVETRQITKHVATILDSKFNEDSNNRDVQIITLKSALVSEFRKTFNLYKVREINDLHHAHDAYLNAVVALSLLRVYPQLKPEFVYGEYGKNSIHDQNKATIKKQFYSNITRYFASKDYIINDDGEILWNKQETIAQVIKTLGMHQVNVVKKVEIQKGGFSKESIQPKGESQKLIRRKQQWNTKKYGGFDSPVVAYAILLSFDKGKRKARSFKIVGITIQDRESFEGNPILYLSKKDYHNPKVEAILPKYSLFEFENGRRRMVASASETQKGNQLIIPGHLMELLYHSKKIINGKNSDSVSYIQNNKEKFREIFEYIVDFSSKYISADANLNKIEKIFENNFHKASEQEIAKSFINLLTFTAMGAPADFEFFGEKIPRKRYVSISEIIDAVFIHQSITGLYETRVRLTEV

SEQ ID NO: 189 - protein, 1123 aa, Mobiluncus curtisii
MFVYLNSPRGFGPATFLTDLPHFCIIFGNNDFMDNRKYHVGIDVGTNSVGFAAVEVGDSGSPIRFLNTMVVIHDSGVDPEQKKYAITRLASAGTARRTRRLYRTRRQRLRELDDFISNELGYPLVNLENFADPYEPWKVRADLATIKLPADELPEAMSIALRHMARHRGWRSPYQRVEALHLHAEISEEFSALKKRVMEKTGDVFSDDATPAEVLVDLMGRQKIRGADGMLSGKLRQSDNANELRKIASVQGIDDETLNRIIDRVFFSRSPKGKASERVGMDALPGQGSKPRALKAMPSFQKFRIVSVICNLRIKDSGDDNRPLSMEEKEQLIGYLMSSTTDDHVTWTDVAELLHVKRSNLQGTAKEGPDGERPYTRPPVNSAWSKIKDSKIKSLVALWKTGDVDVQSAIVEALSNASVLEDARPGADIVVAYLESLDDKELESLDKVGLPAGRASYSEDSLERLTERMLQDDCDLFEARKREFGVSDDWKPPADPIYAPVGNPGVDRVLKIVNRLLMAAEREWGAPTQINIEHVRSGFSSELMQREFERENERRRAQNEEAVKAILTEKGGNSHVSKYDIIRYYAVKRQNCQCLYCGTPITFSDCELDHIVPRKGVGSTNSRVNLAAACRSCNRDKSNLPFAVWAGKTSNFDVSIDGAVSRVKQWQRSQNEGAREFRAFQNEVISRLLKTTEDPEIDSRSLESVAWMARELHHRVEYYFQSKGAQTQVSVYRGAVTAQARKSSGLEDKVKMIGGGGKTRLDRRHHAMDAATIALMTPGISTTLSEKNNLRDAQKFTGQSETWKDYCGRTETAREHFAVWKSNMERLTDLFNDKLENDAIPVVQPLRLRLSDSKAHDDGIGKLDSKKLGSVWSLADIDRAATPQIWTALTRCDDFDPTKGLPENANRVIRAQGVKYESEDNIPVFPSNVAAIAVRDGYAEIGSTIHHARIYRIDDGKKIFYSMIRVFAVDLLKHQAEDLFTVKLPPSAISIRTCEDSLRRALSNGTAEYLGWLVPGDEIIVDTSDKAFHTGQIGDLLRNFPVNSFRLTGFPSNSRLRLKPVLLAGEGLRDDAEDSIKKILSGQGWRPAINVLFSKGKPRIVRRNSLGIERPSSNNGLPFSWEA

SEQ ID NO: 190 - protein, 1054 aa, Staphylococcus lugdunensis
MNQKFILGLDIGITSVGYGLIDYETKNIIDAGVRLFPEANVENNEGRRSKRGSRRLKRRRIHRLERVKKLLEDYNLLDQSQIPQSTNPYAIRVKGLSEALSKDELVIALLHIAKRRGIHKIDVIDSNDDVGNELSTKEQLNKNSKLLKDKFVCQIQLERMNEGQVRGEKNRFKTADIIKEIIQLLNVQKNFHQLDENFINKYIELVEMRREYFEGPGKGSPYGWEGDPKAWYETLMGHCTYFPDELRSVKYAYSADLFNALNDLNNLVIQRDGLSKLEYHEKYHIIENVFKQKKKPTLKQIANEINVNPEDIKGYRITKSGKPQFTEFKLYHDLKSVLFDQSILENEDVLDQIAEILTIYQDKDSIKSKLTELDILLNEEDKENIAQLTGYTGTHRLSLKCIRLVLEEQWYSSRNQMEIFTHLNIKPKKINLTAANKIPKAMIDEFILSPVVKRTFGQAINLINKIIEKYGVPEDIIIELARENNSKDKQKFINEMQKKNENTRKRINEIIGKYGNQNAKRLVEKIRLHDEQEGKCLYSLESIPLEDLLNNPNHYEVDHIIPRSVSFDNSYHNKVLVKQSENSKKSNLTPYQYFNSGKSKLSYNQFKQHILNLSKSQDRISKKKKEYLLEERDINKFEVQKEFINRNLVDTRYATRELTNYLKAYFSANNMNVKVKTINGSFTDYLRKVWKFKKERNHGYKHHAEDALIIANADFLFKENKKLKAVNSVLEKPEIESKQLDIQVDSEDNYSEMFIIPKQVQDIKDFRNFKYSHRVDKKPNRQLINDTLYSTRKKDNSTYIVQTIKDIYAKDNTTLKKQFDKSPEKFLMYQHDPRTFEKLEVIMKQYANEKNPLAKYHEETGEYLTKYSKKNNGPIVKSLKYIGNKLGSHLDVTHQFKSSTKKLVKLSIKPYRFDVYLTDKGYKFITISYLDVLKKDNYYYIPEQKYDKLKLGKAIDKNAKFIASFYKNDLIKLDGEIYKIIGVNSDTRNMIELDLPDIRYKEYCELNNIKGEPRIKKTIGKKVNSIEKLTTDVLGNVFTNTQYTKPQLLFKRGN

SEQ ID NO: 191 - protein, 586 aa, Pseudoramibacter alactolyticus
MTYYLGLDMGTGSVGWAATDKNYKLIRAKGKDLWGVRLFQTAKTAAERRSHRVARLRRQREKVRIGYLKTIFSDAINKVDPGFFQRLDDSFFYAEDKNINQPYALFADTGYTDVDYYRDYPTIFHLRSTLIHDTSPKDVRLVYLAVLNMFKHRGHFLASNLSENGVDDFGDIYQQWCKSVPKPVQISDPEAKTEKIENILSKAGISNTRRLEALLEVFGIKRRDAFAEVLKLWCGLKGNLSKIWSETDFSDLDNTKPALSFKDSNLDMVLSQLEEILPDEDYSWLMLTKQIYDWSLLSGMMKDASGKSYDYLSDARVASYQKHSEDLKTLKRFYHDNHLSAAYDQMFRVMGKDNYSAYAGSVQSKKEVVRRGASCGIEELYKRIKKDLKPVPDCETKQIILENIERGTFLPKQLTRDNGVIPNQIHVHELKAILKNAENYLPFLKEGSELTNSEKILQLFQFQIPYYVGPLYSDENNYAWVVRKEGGRVFPWNFAEKVDEKASAEGFISELVARCTYLDNEKVLPKASLLYEKFMVLNELNNLRINGERISVDIKQELYQNLFTRGKKVTLKKSEGLFGGQRIFCL

SEQ ID NO: 192 - protein, 1385 aa, Gemella morbillorum
MKNKTWYLGLGVGPTSIGWAATDSNYKLLRKNKKRLWGVRLFEEAKTAVDRRTFRAERRRLARRKWRISLLEELFAKEVSKNDPNFFLRLKESKYHFEDKSLMNEYILFNDKDYTDKDYYKEYPTIYHLRLSLTTEENPDIRKVYLAVHSMLKNRGHFLLQGQSFNDSNIDSVIKELLELETVKINFEVTDEVIHSLKKIALEKKNLSDKNNDVKKLYPKEKQLQEIFKLVFGGKTSLDKLYDIEEYKELDNSVKSISFKEKVYEEVRPDYEQILSNYIELLDLAKLVYDSIVLADIKKEGKTISESKVELYNKHKDDLANLKKLVKIDSKLSEDKKKEVYFTIFKEDKEKGTNYVNYTHRSQEGKSCSYEDFKKFLKKELEKLEDSPTKTTILEELDLETFLPLQRTKDNSVVPYQIHKEELVKILDNAAKYHSFLAEKDDSGYSTREKVVQLFEFRIPYYIGPLNAHHNTENGGYSWAIRKKGMESVPVTPWNFKDVIDESASAEAFVNNLKNKCAYLSGEDVLPKNSLLYSEYALLNELNALRYEGNRISVEARDVIVTKLFKEQGKKVTKKTIKELLKTEGFIDGKGEIVGIDNIVKNDLKSYRDFKKILADKFDKERVENIILWITLYGESRKLIKEKITKVYGDFYTVDEIEKMSRLTYKDWGILSRKLLTELVSEKLYNEETGECLNIIGAMRQGTILFMELLADKFDYMSQIKNHNKENKDDITEITPDILENLHASPAVKRSIWQTVRIVEELKTIIGCVPTKIFIETTKRNNAPYKVPTLNRNDLVTKYKTIREHEIFELEKELKNTLDFTLNKNRLINEEPSKLKATKLYLYYTQLGRCMYTGKKIDLGELFDNNNKYDIDHIYPQSKVKDGSFNNIVLVTKASNDMKADVFPLKSKFQTKENKIFWRFLKEKKLITEEKYNRLVRTEEFSNGELTGFITRQLVETSQAIKVISNVLRELNPETTICYSKAENVSSFRQSFGKIKEANRKAENNEKLIRVQEINDYYNAKDAYLSIVVGNVYDVKFTRNVHNFIKNNKDARRYSLNGLFYTDVKNANTIAWEMDKTVHVVEKTMNNNNILITRRTSEQKGALYDATLYKAKVAEKAKEGTYYPLKTTDSKIKDVGKYGGFTKIKIAYYSIFEYTLDGKKGKQKITRIVPIPIYISQNIKDDKALLEYAQTRLPGKDLKIKYRKLCIGSLVKINNFNYYIGGKTNNNFTFDSAVQVILDKDSESYIKELAKYLNWKKENKDGKLWESITEDKNIQLYDSLVKKMNTGIFIRKTPNKYTELLTLEVKNKFINIDIDEQVKLLLEILNLLTNKKFTSKLNEIGITASRGVCSFNLSNQSQFSIIEQSVTGVYEKEKLIIEKKKEGIL

SEQ ID NO: 193 - protein, 1029 aa, Alicycliphilus denitrificans
MRSLRYRLALDLGSTSLGWALFRLDACNRPTAVIKAGVRIFSDGRNPKDGSSLAVTRRAARAMRRRRDRLLKRKTRMQAKLVEHGFFPADAGKRKALEQLNPYALRAKGLQEALLPGEFARALFHINQRRGFKSNRKTDKKDNDSGVLKKAIGQLRQQMAEQGSRTVGEYLWTRLQQGQGVRARYREKPYTTEEGKKRIDKSYDLYIDRAMIEQEFDALWAAQAAFNPTLFHEAARADLKDTLLHQRPLRPVKPGRCTLLPEEERAPLALPSTQRFRIHQEVNHLRLLDENLREVALTLAQRDAVVTALETKAKLSFEQIRKLLKLSGSVQFNLEDAKRTELKGNATSAALARKELFGAAWSGFDEALQDEIVWQLVTEEGEGALIAWLQTHTGVDEARAQAIVDVSLPEGYGNLSRKALARIVPALRAAVITYDKAVQAAGFDHHSQLGFEYDASEVEDLVHPETGEIRSVFKQLPYYGKALQRHVAFGSGKPEDPDEKRYGKIANPTVHIGLNQVRMVVNALIRRYGRPTEVVIELARDLKQSREQKVEAQRRQADNQRRNARIRRSIAEVLGIGEERVRGSDIQKWICWEELSFDAADRRCPYSGVQISAAMLLSDEVEVEHILPFSKTLDDSLNNRTVAMRQANRIKRNRTPWDARAEFEAQGWSYEDILQRAERMPLRKRYRFAPDGYERWLGDDKDFLARALNDTRYLSRVAAEYLRLVCPGTRVIPGQLTALLRGKFGLNDVLGLDGEKNRNDHRHHAVDACVIGVTDQGLMQRFATASAQARGDGLTRLVDGMPMPWPTYRDHVERAVRHIWVSHRPDHGFEGAMMEETSYGIRKDGSIKQRRKADGSAGREISNLIRIHEATQPLRHGVSADGQPLAYKGYVGGSNYCIEITVNDKGKWEGEVISTFRAYGVVRAGGMGRLRNPHEGQNGRKLIMRLVIGDSVRLEVDGAERTMRIVKISGSNGQIFMAPIHEANVDARNTDKQDAFTYTSKYAGSLQKAKTRRVTISPIGEVRDPGFKG

SEQ ID NO: 194 - protein, 1422 aa, Sutterella wadsworthensis
MTQSERRFSCSIGIDMGAKYTGVFYALFDREELPTNLNSKAMTLVMPETGPRYVQAQRTAVRHRLRGQKRYTLARKLAFLVVDDMIKKQEKRLTDEEWKRGREALSGLLKRRGYSRPNADGEDLTPLENVRADVFAAHPAFSTYFSEVRSLAEQWEEFTANISNVEKFLGDPNIPADKEFIEFAVAEGLIDKTEKKAYQSALSTLRANANVLTGLRQMGHKPRSEYFKAIEADLKKDSRLAKINEAFGGAERLARLLGNLSNLQLRAERWYFNAPDIMKDRGWEPDRFKKTLVRAFKFFHPAKDQNKQHLELIKQIENSEDIIETLCTLDPNRTIPPYEDQNNRRPPLDQTLLLSPEKLTRQYGEIWKTWSARLTSAEPTLAPAAEILERSTDRKSRVAVNGHEPLPTLAYQLSYALQRAFDRSKALDPYALRALAAGSKSNKLTSARTALENCIGGQNVKTFLDCARRYYREADDAKVGLWFDNADGLLERSDLHPPMKKKILPLLVANILQTDETTGQKFLDEIWRKQIKGRETVASRCARIETVRKSFGGGFNIAYNTAQYREVNKLPRNAQDKELLTIRDRVAETADFIAANLGLSDEQKRKFANPFSLAQFYTLIETEVSGFSATTLAVHLENAWRMTIKDAVINGETVRAAQCSRLPAETARPFDGLVRRLVDRQAWEIAKRVSTDIQSKVDFSNGIVDVSIFVEENKFEFSASVADLKKNKRVKDKMLSEAEKLETRWLIKNERIKKASRGTCPYTGDRLAEGGEIDHILPRSLIKDARGIVFNAEPNLIYASSRGNQLKKNQRYSLSDLKANYRNEIFKTSNIAAITAEIEDVVTKLQQTHRLKFFDLLNEHEQDCVRHALFLDDGSEARDAVLELLATQRRTRVNGTQIWMIKNLANKIREELQNWCKTTNNRLHFQAAATNVSDAKNLRLKLAQNQPDFEKPDIQPIASHSIDALCSFAVGSADAERDQNGFDYLDGKTVLGLYPQSCEVIHLQAKPQEEKSHFDSVAIFKEGIYAEQFLPIFTLNEKIWIGYETLNAKGERCGAIEVSGKQPKELLEMLAPFFNKPVGDLSAHATYRILKKPAYEFLAKAALQPLSAEEKRLAALLDALRYCTSRKSLMSLFMAANGKSLKKREDVLKPKLFQLKVELKGEKSFKLNGSLTLPVKQDWLRICDSPELADAFGKPCSADELTSKLARIWKRPVMRDLAHAPVRREFSLPAIDNPSGGFRIRRTNLFGNELYQVHAINAKKYRGFASAGSNVDWSKGILFNELQHENLTECGGRFITSADVTPMSEWRKVVAEDNLSIWIAPGTEGRRYVRVETTFIQASHWFEQSVENWAITSPLSLPASFKVDKPAEFQKAVGTELSELLGQPRSEIFIENVGNAKHIRFWYIVVSSNKKMNESYNNVSKS

SEQ ID NO: 195 - protein, 1132 aa, Nitratifractor salsuginis
MKKILGVDLGITSFGYAILQETGKDLYRCLDNSVVMRNNPYDEKSGESSQSIRSTQKSMRRLIEKRKKRIRCVAQTMERYGILDYSETMKINDPKNNPIKNRWQLRAVDAWKRPLSPQELFAIFAHMAKHRGYKSIATEDLIYELELELGLNDPEKESEKKADERRQVYNALRHLEELRKKYGGETIAQTIHRAVEAGDLRSYRNHDDYEKMIRREDIEEEIEKVLLRQAELGALGLPEEQVSELIDELKACITDQEMPTIDESLFGKCTFYKDELAAPAYSYLYDLYRLYKKLADLNIDGYEVTQEDREKVIEWVEKKIAQGKNLKKITHKDLRKILGLAPEQKIFGVEDERIVKGKKEPRTFVPFFFLADIAKFKELFASIQKHPDALQIFRELAEILQRSKTPQEALDRLRALMAGKGIDTDDRELLELFKNKRSGTRELSHRYILEALPLFLEGYDEKEVQRILGFDDREDYSRYPKSLRHLHLREGNLFEKEENPINNHAVKSLASWALGLIADLSWRYGPFDEIILETTRDALPEKIRKEIDKAMREREKALDKIIGKYKKEFPSIDKRLARKIQLWERQKGLDLYSGKVINLSQLLDGSADIEHIVPQSLGGLSTDYNTIVTLKSVNAAKGNRLPGDWLAGNPDYRERIGMLSEKGLIDWKKRKNLLAQSLDEIYTENTHSKGIRATSYLEALVAQVLKRYYPFPDPELRKNGIGVRMIPGKVTSKTRSLLGIKSKSRETNFHHAEDALILSTLTRGWQNRLHRMLRDNYGKSEAELKELWKKYMPHIEGLTLADYIDEAFRRFMSKGEESLFYRDMFDTIRSISYWVDKKPLSASSHKETVYSSRHEVPTLRKNILEAFDSLNVIKDRHKLTTEEFMKRYDKEIRQKLWLHRIGNTNDESYRAVEERATQIAQILTRYQLMDAQNDKEIDEKFQQALKELITSPIEVTGKLLRKMRFVYDKLNAMQIDRGLVETDKNMLGIHISKGPNEKLIFRRMDVNNAHELQKERSGILCYLNEMLFIFNKKGLIHYGCLRSYLEKGQGSKYIALFNPRFPANPKAQPSKFTSDSKIKQVGIGSATGIIKAHLDLDGHVRSYEVFGTLPEGSIEWFKEESGYGRVEDDPHH

SEQ ID NO: 196 - protein, 1327 aa, Solobacterium moorei
MEGQMKNNGNNLQQGNYYLGLDVGTSSVGWAVTDTDYNVLKFRGKSMWGARLFDEASTAEERRTHRGNRRRLARRKYRLLLLEQLFEKEIRKIDDNFFVRLHESNLWADDKSKPSKFLLFNDTNFTDKDYLKKYPTIYHLRSDLIHNSTEHDIRLVFLALHHLIKYRGHFIYDNSANGDVKTLDEAVSDFEEYLNENDIEFNIENKKEFINVLSDKHLTKKEKKISLKKLYGDITDSENINISVLIEMLSGSSISLSNLFKDIEFDGKQNLSLDSDIEETLNDVVDILGDNIDLLIHAKEVYDIAVLTSSLGKHKYLCDAKVELFEKNKKDLMILKKYIKKNHPEDYKKIFSSPTEKKNYAAYSQTNSKNVCSQEEFCLFIKPYIRDMVKSENEDEVRIAKEVEDKSFLTKLKGTNNSVVPYQIHERELNQILKNIVAYLPFMNDEQEDISVVDKIKLIFKFKIPYYVGPLNTKSTRSWVYRSDEKIYPWNFSNVIDLDKTAHEFMNRLIGRCTYTNDPVLPMDSLLYSKYNVLNEINPIKVNGKAIPVEVKQAIYTDLFENSKKKVTRKSIYIYLLKNGYIEKEDIVSGIDIEIKSKLKSHHDFTQIVQENKCTPEEIERIIKGILVYSDDKSMLRRWLKNNIKGLSENDVKYLAKLNYKEWGRLSKTLLTDIYTINPEDGEACSILDIMWNTNATLMEILSNEKYQFKQNIENYKAENYDEKQNLHEELDDMYISPAARRSIWQALRIVDEIVDIKKSAPKKIFIEMAREKKSAMKKKRTESRKDTLLELYKSCKSQADGFYDEELFEKLSNESNSRLRRDQLYLYYTQMGRSMYTGKRIDFDKLINDKNTYDIDHIYPRSKIKDDSITNRVLVEKDINGEKTDIYPISEDIRQKMQPFWKILKEKGLINEEKYKRLTRNYELTDEELSSFVARQLVETQQSTKALATLLKKEYPSAKIVYSKAGNVSEFRNRKDKELPKFREINDLHHAKDAYLNIVVGNVYDTKFTEKFFNNIRNENYSLKRVFDFSVPGAWDAKGSTFNTIKKYMAKNNPIIAFAPYEVKGELFDQQIVPKGKGQFPIKQGKDIEKYGGYNKLSSAFLFAVEYKGKKARERSLETVYIKDVELYLQDPIKYCESVLGLKEPQIIKPKILMGSLFSINNKKLVVTGRSGKQYVCHHIYQLSINDEDSQYLKNIAKYLQEEPDGNIERQNILNITSVNNIKLFDVLCTKFNSNTYEIILNSLKNDVNEGREKFSELDILEQCNILLQLLKAFKCNRESSNLEKLNNKKQAGVIVIPHLFTKCSVFKVIHQSITGLFEKEMDLLK

SEQ ID NO: 197 - protein, 738 aa, Treponema phagedenis
MLQELFAKEIAKIDEGFFRRLDESAFYLEDKSLKQKYSLFNDDNFTDKDYYKKFPTIHHLIKALINDETHVDIRLLYLACHTIIKNRGHFLFEGKEFNTESRFDDAINELFSYLRQDMEIDFAFEDKIADIKEILENKKIGMRDKQNALNKKLSIAPKDKQKKEIIKLIVGASFNLKTLFNDEKYSSEKESYSFAKSNYEEKEAVLESLLGDGFGLILRAKAVYDSSVLSEILGNETYLSFAKVKIYDKHKEDLAKLKKVIKTYHADEFKKVFAEANIQGNYCSYVGSCKKNGKKVPIEKRADKDAFYDFLKKILKDEKAKNSDADYAFILNEIELKTFLPKQVSKKNANIPYQLRRMELEKIVNNAEKYFSFLSEKDEYGTVKEKIIQLLTFKRPYYIGIIQDTHKEKFPDRCWVVKKENAKNEKITPWNFYDHIDEDKTAEAFITSRTNKCTYLIGEDVLPRNSLLYMEYTVLNELNNLKVSVDGVNIFDVKLKKKIYEQVFKQRKEVSKKTIADFLKKEGICKKENDVVITGIDEKCTTSLKLYIDIKKIIGKRIEEEPTKNALEDIILWASIYDEGEGRKILEAKIQSVYPDVFTQDELNKILKLKISGWGRFSRKFLESIVASFPGFTDTINIITAMRETNFNLMELLGDAYGFSKGIEKFNSKFNDDKKVFSYDKLVKDLYLSPSVKRMLWRALVIVKEVKSIMGKDPKKYLLKWQEEKKLKREGLPPAMQV

SEQ ID NO: 198 - protein, 1377 aa, Streptococcus equinus
MEKTYSIGLDIGTNSVGWAVITDDYKVPAKKMKVLGNTDKKYIKKNLLGALLFDSGETAEATRLKRAARRRYTRRKNRLRYLQEIFAKEMAKVDESFFQRLEESFLTDDDKTFDSHPIFGNKAEEDTYHQEFPTIYHLRKHLADSPEKVDLRLVYLALAHMIKFRGHFLIEGQLNAENTDVQKIFADFVGVYDRTFDDSHLSEITVDAASILTEKISKSRRLENLIKQYPTEKKNTLFGNLVALALGLQPNFKTNFKLSEDAKLQFSKDTYDEDLEELLGKIGDDYADLFTAAKNLYDAILLSGILTVDDNSTKAPLSASMIKRYEEHHEDLEKLKTFIKVNNFDKYHEIFKDKSKNGYAGYIENGVKQDIFYKHLKSIISEKNGGQYFLDKIEREDFLRKQRTFDNGSIPYQIHLQEMRTILRRQGEYYPFLKENQAKIEKILTFRIPYYVGPLARKNSRFAWAKYHSDEPITPWNFDEVVDKEKSAEKFITRMTLNDLYLPEEKVLPKHSYVYETFAVYNELTKIKYVNEQGKSFFFDANMKQEIFDHVFKENRKVTKAKLLSYLNNEFEEFRINDLIGLDKDSKSFNASLGTYHDLKKILDKSFLDDKTNEQIIEDIVLTLTLFEDRDMIHERLQKYSDIFTSQQLKKLERRHYTGWGRLSYKLINGIRNKENNKTILDFLIDDGDANRNFMQLINDDSLSFKTTIQEAQVVGDVDDIEAVVHDLPGSPAIKKGILQSVKIVDELVKVMGHNPQNIVIEMARENQITGYGRNRSNQRLKRLQDSLKEFGSDILSKKKPSYVDSKVENSHLQNDRLFLYYIQNGKDMYTGEELDIDHLSDYDIDHIIPQAFIKDNSIDNRVLTSSAKNRGKSDDVPSIEIVRNRKSYWYKLYKSGLISKRKFDNLTKAERGGLTETDKAGFIKRQLVETRQITKHVAQILDARFNTKCDENDKVIRDVKVITLKSSLVSQFRKEFKFYKVREINDYHHAHDAYLNAVVGTALLKKYPKLAPEFVYGEYKKYDVRKLVAKSSDNHSELGKATAKYFFYSNLMNFFKTEVKYADGRVFERPDIETNADGEVVWNKQRDFNIVRKVLSYPQVNIVKKVEVQTGGFSKESILPKGDSDKLIPRKTKKLQWETQKYGGFDSPTVAYSVLVVADVEKGKTRKLKTVKELVGISIMERSSFEENPVSFLEKKGYHNVQEDKLIKLPKYSLFEFEGGRRRLLASATELQKGNEVVLPQYMVNLLYHSQHVNNSHKPEHLNYVKQHKDEFKDIFNLIISIARINILKPKVVDNLINEFTEYGQEDISSLSESFINLLKFISFGAPGAFKFLKLDVKQSNLRYKSTTEALSATLIHQSVTGLYETRIDLSKLGEE

SEQ ID NO: 199 - protein, 1128 aa, Streptococcus vestibularis
MSDLVLGLDIGIGSVGVGILNKVTGEIIHKNSRIFPAAQAENNVERRTNRQGRRLTRRKKHRRVRLNHLFEESGLITDFTKVSINLNPYQLRVKGLIDELSNEELFIALKNMVKHRGISYLDDASDDGNSSVGDYAQIVKENSKQLETKTPGQIQLERYQKYGQLRGDFTVEEDGKKHRLINVFPTSAYRSEALRILQTQKEFNPQITDEFINRYLEILTGKRKYYHGPGNEKSRTDYGRYTTKKDSENEYITLDNIFGILIGKCTFYPEEYRAAKASYTAQEFNLLNDLNNLTVPTETKKLSEEQKNQIINYVKNEKAMGPAKLFKYIAKLLSCDVADIKGYRIDKSDKAEIHTFEAYRKMKTLETIDFEKMSRDQLDKLAYVLTLNTEREGIQEALDHEFADGNFSQEQIDELVQFRKANSSIFGKGWHNFSVKLMMELIPELYATSEEQMTILTRLGKQKTTSSSNKTKYIDEKLLTEEIYNPVVAKSVRQAIKIVNAAIKEYGDFDNIVIEMARETNEDDEKKAIQKIQKANKDEKDAAMLKAANQYNGRAELPHSVFHGHKQLATKIRLWHQQGERCLYTGKTISIHDLINNPNQFEIDHILPLSITFDDSLANKVLVYATANQEKGQRTPYQALDSMDDAWSFRELKAFVRESKSLSNKKKEYLLTEEDISRFDVRKKFIERNLVDTRYASRVVLNALQEHFRAHKTDTKVSVVRGQFTSQLRRHWGIEKTRDTYHHHAVDALIIAASSQLNLWKKQKNTLVNYSENQLLDIETGELISDDEYKESVFKAPYQHFVDTLKSKEFEDSILFSYQVDSKFNRKISDATIYATRQAKVGKDKKDETYVLGKIKDIYSQTGYDAFIKIYQKDKSKFLMYRHDPQTFEKVIEPILENYPNKEMNEKGKEVPCNPFLKYKEEHGDYIRKYSKKGNGPEIKSLKYYDSKLGNHIDITPKDSNNKVVLQSVSPWRADVYFNKTTGKYEILGLKYADLQFEKGTGTYKISQEKYNVIKKKEGVDSDSEFKFTLYKNDLLLIKDTETKEQQLFRFLSRTKPNVKHYVELKPYDKQKFEGNESLINVLGAVAKGGQCQKGINKPNISIYKVRTDVLGNQHIIKNEGDKPKLDF

SEQ ID NO: 200 - protein, 1080 aa, Unknown
  Methylocystis sp.
MRVLGLDGGIASIGWALIEIFEDHEPSDGRIIDTGAWMFDAPEEKSQTGTKLKSELRRIFRGQRRVIRRRRQRMNEVRRILHRHGLLSSDNRDALKQPGLDPWKIRAEGIDRLLSPIEFAVALGHIARHRGFKSNSKGAKTSDLDAESSRMKKAVGETREKLARFGSPAKLLVEDEGFVLRQTKLKSGALETVRRFRNRDGDYSRSLLRDDLAAEVRALFRAQARLQSTFAKVELEAEFTQAAFFQRPLQDSERLVGPCPFEPAEKRSPKRGYSFELFRFLSRLNHLTLREGSEERTLTVEELRTAAADFGGVAKFTFSTLRKRLALPDIAIFVGIKADDEKKLDVVARSGEAATGTARLRRVVIDALGELAWGALISAPERLDKITEIITFRSDLDRIRAGLIEAGFDTPLIEAIVRAAADGKLDAFTGVGHISAKAARNIIPGLMRGMTYDKACAAAGYDHTASRERDAFDVGMHGKEALKKILQEERISRELVGSPSARKALIEAVKQVKAIIEKYGVPDRIHVELARDVGKSIEERRDIHFGIEKRSRQKDKLRELFGKEVGHLPQDGERGKEELLRFELWNEQMGRCLYTDEYINPKQLVASDNSVQVDHILPWSRFGDDSYLNKTLCTAKANQDKKGRTPYEWFRADKPEAEWDAFVARVESIQFMKGLKKRNYKLKNAEEAAEKFRSRNLNDTRWTCRLLAEALKQLYPKGEKDKDGKERRRVFTRPGALTNRLRRAWSLQRRKKSEKGERIADDRHHALDAIIVAATTESLLIRATREVQDIERKGLHYDLTKNITQPWPGFADEALDAVEKVFVARAERRRARGKAHDATIRHIAVRDDEAKVYERKKVGDIKLGDLIRVKDAERNAPLIENLRKWIEAGSPRDNPPLSPKGDPVSKVRLVTKNKVNITLDTGNPERLATVDRGEMARVDVFRKANRKGKYEYYLVPIYPHEIATMETPPMRAVQGGGDDDKWPEIDSTFEFLWSINQLSLLELTKPDGEVIRSYFRSLDRNTGALTVSGIANSTATRKGIGTRTLIDFKKLHVDRLGQIFEVERELRTWRGETWRGKDCI

SEQ ID NO: 201 - protein, 1087 aa, Phascolarctobacterium succinatutens
MLRMKYAIGLDIGIASVGYAVLALDHEENPWGIIRLGSRIFDVAENPKDGASLALPRREARSVRRRLRRHHHRLERIKNLLINTEFITKDELLHLYDGNLSDVYELRVKALDYSVTNAELTRILLHLAQRRGFKSNRKSDANDKEAGQLLEAVSANAKRMQENHYRTVGEMFYKDDLFSKYKRNKGGTYLTTVHRDMIAAEARTILEKQFALGNNICTQDFIDKYLSILLSQRQFDEGPGEPSPYAGNQIANMIGKCTFEPNEYRAAKASYSFERFNLLQKVNHLRLLLEGKSIALDNEQRKKIIALAHDKADLRYSHIRKALGLDEKVLFNTITYNDDVSVIEKKTKFNFLQAYHQIKKVLAEDMQKLTTEQLDNIGQILSTYKSDNKRTEELSALGLEKKIIDALLGINGLSKFAHLSLKALRKINPYLEEGKIYNEACTAAGYDFKAHANTQKTELLPAYKEEMDDITSPVARRAIAQSIKVINAIIREQKGSPLYINIELAREMAKGFDERTQIDKANKENQAKNERIMERIRTEFHKANPTGMDLIKLKLWEEQDGRSPYSQKAISINRLFEPGYVDIDHIVPYSISFDDSFKNKVLVFSDENRDKGNRLPIAYLQSKFGAKAAENFMIWVQSNIKDYKKRQKLLKREITEEDINKFKERNLQDTKTISRFLYNYINDYLLFAPSDTGKKKRVTAVNGTITAYLRKRWGINKIRANGDKHHAVDAVVIACTTDKMIKDLSSFSRYHELEYTHTDTESFLVNSLTGEILKRFPYPWEDFRPELMARLSDNPADALRKLNLIFYHGIDLSTIKPIFVSRMPRHKVTGAAHKATIKSARCLDNGIVICKTSLQNLKLDKEGEIANYYAPESDTILYNALKERLRSYDNKPAKAFAEPFYKPKADGTPGPLVKKVKVYEKSTLNVAVQQNTAVADNDSMVRVDVFHVKGNGYYLVPIYIADTLKKELPNKAIVAYKPYADWPVMDDSNFIFSLYPNDLIKFEHKNSVKFAKVNKESTLNDFYSTKSEIVYFKGCNINTGAITIINHENTYVVSSLGVKTLPSLEKYQADVLGNYTKVKKEVRKPFR

SEQ ID NO: 202 - protein, 1375 aa, Lactobacillus ruminis
MRKNQEPYNIGLDIGTSSIGWSIMNDNFDLMRVKGKKGIGVRLYNEGQSAAERRMHRTARRRYGRRKWRLRLLEDFFDEHMAEVDDTFFARLKDSNISPKDDKKYRKSLLFPKSKGVTYQDDGEFYKKYPTMYHLRYALMTEHRKFDLREIYLAFHHMVKYRGNFLYDTSVDSFEAKNLDIKGKFDEINDLLSSYTDFYVDNSNAALVESILLEKNTTRKDKSKKIAKLLHVEDKEKGKNKKAKDLATQISNAVLGLKCNFHLIFELQQKYSFDLCSEKTEENIAKLSEVLDENQKMLLMILKEVQDQVMLNAFVPSGMSLSEAMMQKYDDYGEQLKIYHELEHSVSDDSAAKLRGAYRDYNDNIIKRIDGDNKKDTFYKRVKNILTKISKEYVDQDVLESCGKLKKLIDENKLFIRQRTAANGVLPHQLHQIEMRKIIDNQKEYYPWLAEPNPNEKRRVYSKYKVEELIAFRIPYYVGPLVDPNNADKNKEARFSWMVRKKDGEITPWNFYDKVDWAESANNFIERMKSKDTYLLGEDVVPKESMLYQKYEVLNELNNLRINDSGLSDSFEDVKLKQAIYNDLFKKQKIVKITDLQNYLVQNHKYLVKPKISGLADENRFLSSLSTYSDLKTIFGDKVDDRTYFNDFEKMVEYSTVFEDGHDYNQKLDEYTWLTKEEKYKIGKKRYRGWGKLSKKLLTGLRDKNNHTIMDNLWETNRNFMQIQTADEFSKQIAEENERHLKGSVSDAINDMYTSPANKKAIRQVLRVVDDIQKAMGYAPSSISLEFAREDGPSVRTVSRANRMKSIYEKYASEVSEEVMKDLDGVIKDKKGLNDRLYLYFEQQGKDMYSGHPLDFDKVISGQEYDIDHILPQAVIKDDSLDNRVLTTKALNNDVKSKGVPCRMFNGMHSFWKNLYDKGFISRRKFNNLTTNPENIDKYKMKGFVNRQLVETRQIIKLVANVLNDKYQNDDVDIIEVRAELTHDVRKHFKFYKNRNVNDYHHAFDAYLTSFIGHYLFKKYPNLRPLFDYNDFMKVSDNVFKQLRGNNFLGEFLNKTGDIISTDGNFVLNKEEMINKLNKAYAFKKILVTKEVGQRTGAMFNETRYPAPNSRKAALKYRRMPKPDSLISVKDYKNTDIYGGYSGKNDAYMVIVDMGKQYMVVGVPVRYTEKLDKLRIKHSELYRDELRKVLSRDKTLLDSKGNVKRFDIVLDRVLYGQLIEDGNELFTLGSSKYKRNFRQLFLDKQCIEILDSSATPQPTDEELIWVYDQILDKVDKYFELYDINRQRETLRKGRAAFCSLPNISMKKDDVTKKKILNEILVALHANESESNCEKIGKKVFGRLQVPGGIKLSKEAKLIYQSPTGLFERVVYLKDL

SEQ ID NO: 203 - protein, 1391 aa, Prevotella oralis
MKKILGLDLGTTSIGWALVNEKENNEELSSIIRLGVRVNPLTVDEKSNFEKGKDITTNADRTKCRSARRNLQRFKLRREALADCLKRHGLMTDETPLCETNNSIIFKTYSNRAKAVCEKIALDDFVRVLFMINKKRGYKSSRKLNTDDEGTLVDGMDVAKLLYNEQITPGEYLLRLFKKGKKTRPDFYLSDLKAELERIWDFQRTFYPEILCNALKEDLKGKSRTQSSAIFYAKYKVSTAKIAGKDKRLQELTWRTDALRKQLTIDEVAYVICSINGEVNGSSQRLSMISDRSKLLYFNHQTIGQYLMQRLEENPNAGLKNIIFYRQDYEDEFNDIWNSQATYHKELTPELKKEVKDIIFYQRGLKSCKWLINYCELEHEEIEVKTPEGKLRKITIGSKTCPKSSPLFQEFKIWQVLNNLQVSPLNSRRKAKRKKDEEPSLFSDEDMNTACRYLNEEEKLTLFKELSIKKELKKKDALKLLFENYKELDLNYKVISGNVTMANLYRAFQDIISLTGNGEFDFQAMPAEEAEKTVEEIFGGLGYKTAFLHFDASLHDKEFERQPAYRLWHLLYSYAGDQSKTGIEALVKRIQELCGFEPEYARILANISFIPDYGNLSSKAMRKILPYMQDGYEYSEACSKAGYRHSASSLTKEEINKKNYKTHLDEIKRNSLRNPIVEKILNQMVNVVNSVIDTYSNIDEIRIEMARELKKSKPEREDMSFAISKATKETERIKGILEQEFKIQHVTRNDIIRYRLYEELKPNGYKTLYSNTYIPREDLFSKKFDIEHIIPKARLFDDSYSNKTLELRDINIEKGNQTAYDFVLSKYGEEGLYKYEQRVEEFKKNNEQAGTKCRKLLMREADIPSDFLNRDLNDSQYIAKKAHELLREIVPTVTATTGSITNRLREDWKLVNVMKELNWEKYDKLGLTEEYKDKDGNTVRHIKDWTKRNDHRHHAMDALTIAFTKPSFIQYLNNLNARSNRGGSIYGIEQKELERENNKLVFIPPIDPKIFRKQAKEHLSNILISIKAKNKVVTKNVNKTKSKSGTNRKVQLTPRGQLHLETVYGKIRTYKTEEIKVGTKLTEELIAKVADKKIREALMQRLSEYGGNIKKAFQNISKHPIWLNGSHTKHVPEKVKIVFFEDVFTIRKAITPDIKIDKVIDSKIRRILQERLNEFGGEASKAFSNLDENPIWFNRDKGIAIKSVKIRGIAKGTAIRVKKDIHGKTIIGNNGYPVANDYVNTGNNHHVAIFRDKDGNLQEHIVSFYEATARAIQNLPIVDRNYNSEKDWKFLFSMKQNEYFVFPNPNTGFNPSEISLKDEKNYALISPNLFRVQKLSHYYYVFRHHLETNVDTNLQLKDITWKRITAVNNLTGAVKVRIDHLGRIVDVGEYK

SEQ ID NO: 204 - protein, 1167 aa, Streptococcus sanguinis
MLFGLKTKFKDCFELEEEPDLNFSKENYDDNLEKLLGELGEDFSDVFDKLKILRDTILLSGMLTYTGATHARFSATMVERYEEHRKDLQRFKSFIKQNLSEQDYLDIFGRKTQNGFDVDKETKGYVGYITNKMVLTNPQKQKTIQQNFYDYISGKITGIEGSEYFLNKISDRTFLRKLRTSDNGAIPNQIHAYELEKIIERQGKDYPFLLENKDKLLSILTFKIPYYVGPLAKGNNSRFAWIKRANSSDILDDNDEDTRNGKIRPWNYHKLINMDETRDAFITNLIGNDTILLNEKVLPKRSLIYEEVMLQNELTRVKYKDKYGKAHFFDSEHRQNIINGLFKINSKRVNAERLIKYLSDNHKDLNAIEIVSGVEKGKSFNSTLKTYNDFKTIFSEEFLDSEIYQKELEEIIKVITVFDDKKSIKNYLTKYFGHLEFLDEEKINQLSKLRYTGWGRYSAKLLLDIRDEDTGFNLLQFLRNDEENRNLTNLISDNTLSFDPKIKAIQSKSTVEDDVFDEIKKLAGSPAIKRGILNSIKIVDELVQIIGYPPQNIVIEMARENMTTEEGQKKTKTRKSKLESALKNIENSVLENGKVLHSDEQLQSEKLYLYYLQNGKDIYSLDETGSPAPIYLDQLDQYEVDHIIPYSFLPIDSIDNKVLTHRKNNQRKLDNIPDKETVAHMKPFWEALYNAKLISQTKYQRLTTSERTPDGVLTESMKAGFIERQLVETRQIIKHVARILDNRFSDTKIITLKSQLVTNFRNTFHIAKIRELNDYHHAHDAYLAVVVGQTLLKAYPKLAPELIYGHHVHFNRHEENKATLRKHLYSNIMRFFNNPDSKVSKDIWDCNRDLPIIKHVIYNSQINFVKRTMIKKGAFYNQNPVGKFNKQLAANNRYPLKTKALCLDTSIYGGYGPMNSTLSIIIIAERFNEKKGKIETVKEFHDIFIIDYEKFNNNPFQFLNDTSENGFLKKNNINRVLGFYRIPKYSLMQKIDGTRMLFESKLNLHKATQFKLTKTQNELFFHMKRLLTNSNLMDLKSESAIKESQNFILKHKEEFDNISNQLSAFSQKMLGNTTSLKNLIKGYNERKIKEIDIREETIKYFYDNFIKMFSFVKSGAPKDINDFFDNKYTVARMRPKPDKRLLNATLIHQSITGLYETRIDLSKLGED

SEQ ID NO: 205 - protein, 1334 aa, Staphylococcus pseudintermedius
MGRKPYILSLDIGTGSVGYACMDKGFNVLKYHDKDALGVYLFDGALTAQERRQFRTSRRRKNRRIKRLGLLQELLAPLVQNPNFYQFQRQFAWKNDNMDFKNKSLSEVLSFLGYESKKYPTIYHLQEALLLKDEKFDPELIYMALYHLVKYRGHFLFDHLKIENLTNNDNMHDFVELIETYENLNNIKLNLDYEKTKVIYEILKDNEMTKNDRAKRVKNMEKKLEQFSIMLLGLKFNEGKLFNHADNAEELKGANQSHTFADNYEENLTPFLTVEQSEFIERANKIYLSLTLQDILKGKKSMAMSKVAAYDKFRNELKQVKDIVYKADSTRTQFKKIFVSSKKSLKQYDATPNDQTFSSLCLFDQYLIRPKKQYSLLIKELKKIIPQDSELYFEAENDTLLKVLNTTDNASIPMQINLYEAETILRNQQKYHAEITDEMIEKVLSLIQFRIPYYVGPLVNDHTASKFGWMERKSNESIKPWNFDEVVDRSKSATQFIRRMTNKCSYLINEDVLPKNSLLYQEMEVLNELNATQIRLQTDPKNRKYRMMPQIKLFAVEHIFKKYKTVSHSKFLEIMLNSNHRENFMNHGEKLSIFGTQDDKKFASKLSSYQDMTKIFGDIEGKRAQIEEIIQWITIFEDKKILVQKLKECYPELTSKQINQLKKLNYSGWGRLSEKLLTHAYQGHSIIELLRHSDENFMEILTNDVYGFQNFIKEENQVQSNKIQHQDIANLTTSPALKKGIWSTIKLVRELTSIFGEPEKIIMEFATEDQQKGKKQKSRKQLWDDNIKKNKLKSVDEYKYIIDVANKLNNEQLQQEKLWLYLSQNGKCMYSGQSIDLDALLSPNATKHYEVDHIFPRSFIKDDSIDNKVLVIKKMNQTKGDQVPLQFIQQPYERIAYWKSLNKAGLISDSKLHKLMKPEFTAMDKEGFIQRQLVETRQISVHVRDFLKEEYPNTKVIPMKAKMVSEFRKKFDIPKIRQMNDAHHAIDAYLNGVVYHGAQLAYPNVDLFDFNFKWEKVREKWKALGEFNTKQKSRELFFFKKLEKMEVSQGERLISKIKLDMNHFKINYSRKLANIPQQFYNQTAVSPKTAELKYESNKSNEVVYKGLTPYQTYVVAIKSVNKKGKEKMEYQMIDHYVFDFYKFQNGNEKELALYLAQRENKDEVLDAQIVYSLNKGDLLYINNHPCYFVSRKEVINAKQFELTVEQQLSLYNVMNNKETNVEKLLIEYDFIAEKVINEYHHYLNSKLKEKRVRTFFSESNQTHEDFIKALDELFKVVTASATRSDKIGSRKNSMTHRAFLGKGKDVKIAYTSISGLKTTKPKSLFKLAESRNEL

SEQ ID NO: 206 - protein, 1156 aa, Ruminococcus albus
MGNYYLGLDVGIGSIGWAVINIEKKRIEDFNVRIFKSGEIQEKNRNSRASQQCRRSRGLRRLYRRKSHRKLRLKNYLSIIGLTTSEKIDYYYETADNNVIQLRNKGLSEKLTPEEIAACLIHICNNRGYKDFYEVNVEDIEDPDERNEYKEEHDSIVLISNLMNEGGYCTPAEMICNCREFDEPNSVYRKFHNSAASKNHYLITRHMLVKEVDLILENQSKYYGILDDKTIAKIKDIIFAQRDFEIGPGKNERFRRFTGYLDSIGKCQFFKDQERGSRFTVIADIYAFVNVLSQYTYTNNRGESVFDTSFANDLINSALKNGSMDKRELKAIAKSYHIDISDKNSDTSLTKCFKYIKVVKPLFEKYGYDWDKLIENYTDTDNNVLNRIGIVLSQAQTPKRRREKLKALNIGLDDGLINELTKLKLSGTANVSYKYMQGSIEAFCEGDLYGKYQAKFNKEIPDIDENAKPQKLPPFKNEDDCEFFKNPVVFRSINETRKLINAIIDKYGYPAAVNIETADELNKTFEDRAIDTKRNNDNQKENDRIVKEIIECIKCDEVHARHLIEKYKLWEAQEGKCLYSGETITKEDMLRDKDKLFEVDHIVPYSLILDNTINNKALVYAEENQKKGQRTPLMYMNEAQAADYRVRVNTMFKSKKCSKKKYQYLMLPDLNDQELLGGWRSRNLNDTRYICKYLVNYLRKNLRFDRSYESSDEDDLKIRDHYRVFPVKSRFTSMFRRWWLNEKTWGRYDKAELKKLTYLDHAADAIIIANCRPEYVVLAGEKLKLNKMYHQAGKRITPEYEQSKKACIDNLYKLFRMDRRTAEKLLSGHGRLTPIIPNLSEEVDKRLWDKNIYEQFWKDDKDKKSCEELYRENVASLYKGDPKFASSLSMPVISLKPDHKYRGTITGEEAIRVKEIDGKLIKLKRKSISEITAESINSIYTDDKILIDSLKTIFEQADYKDVGDYLKKTNQHFFTTSSGKRVNKVTVIEKVPSRWLRKEIDDNNFSLLNDSSYYCIELYKDSKGDNNLQGIAMSDIVHDRKTKKLYLKPDFNYPDDYYTHVMYIFPGDYLRIKSTSKKSGEQLKFEGYFISVKNVNENSFRFISDNKPCAKDKRVSITKKDIVIKLAVDLMGKVQGENNGKGISCGEPLSLLKEKN

SEQ ID NO: 207 - protein, 1440 aa, Weeksella virosa
MKTILGLDLGTNSIGWALVEQDFENKQGLILGMGSRIIPMDAGIIGKFAEGSSISQTAERTGYRSIRRLRERHLLRRERLHRVLNILKFLPEHYAAEIDFEKRFGQFLAETEPKLAWKKNAEGKFEFLFQRSFDEMVADFKANGQDIKIPYDWTIYYLRKKALTQKISPQELAWIILNFNQKRGYYQLRGEEEEENPNKKVEFYSLKIVDVVADEQPNKKGDTWYSLHLENGWVYRRSSKIPLYDWKDKVRDFIVTTDINEDGSEKLDKDGEVKRSFRAPKEDDWTLIKKKTEQEIEQFNQTVGSYIYEALLDNPTQKIRGKLVRTIERKFYKSELKKILEKQIELQPELFTEDLYNACARELYRRNVAHQQQLSSRDFVYLFLNDIIFYQRPLRSQKSLISNCSLEFRTIKDKDGNGQIIYLKAIPKSNPYYQEFRVWQWLYNLKIFTKEDDKDVTNQFINKVEDLEALFEFLMNQKEVNHTDILTYLIEPIVKSKYPNAKGKAFKDELKKELKKYRWNYVYDADKDESKSYPMNETRYELRKRLDKVENVPADFMTRKIEQHLWHIIYSVTDKIEFEKALKSFANKYDLHQESFVENFKRFKPFDSDYGTYSEKAIKKLLPLMRVGKYWSWDIIDDKTKTRIGKIITGEYDETIKNRVREKAIDLTEENHFQGLQLWLAQYIVYDRHSEADIAGKWNSVADLEQYLSEFKQHSLRNPIVEQVITETLRVVRDIWKQYGKGAKDYFDEIHIELGREMKNTAEERKRLSSIISENETTNLRIRAILEELMYDENMENVRPYSPMQQEALKIYEDGVLSSSVEIPEDIEKISKKSEPTKSEIQRYKLWLEQKYRSPYTGRPIPLSKLFTPAYQIEHIIPQARFFDDGFSNKVICESEVNALKDKMLGLEFIQNYYGQKVTTSFGEVTILTEDAYKAFVKEHYDKNRSKRNKLLLEEIPEKMIDRQMNDTRYISKYISKVLSNLVRGEKDDEGVNSKNIIPGNGKITGILKQDWGLNDVWNDLILPRFERMNQLTNSTDFTAWNEKHQKFLPSVPLELSKGFQKKRIDHRHHALDALIIACATRDHVNLLNNKHAKSRNERYDLQHKLRHTTPWQDKEGKVRTKFTEFKKPWETFTQDTKKELEKIVVNFKQNLRVINKATNYYEKIVDGKKVMFKQEGVNWAIRKPMHKETVSGKIDLPRVKVSKGKILTATRKSLDTSFNAKTILSITDTGIQKILLNYLKAKGNPELAFSPEGIEEMNQNISLYNDGKPHQPILKVRVFEQGSKFPLGETGNKTTKYVEAAKGTNLFFGVYEDNQGKRSYDTIPLNIVIERQKQGLNSVPETNEKGHRLLFSLSPNDLVYVPIEGEVFDETNPDVNRIYKVVSFSGSQMFCVRQDVATSIVYKLEFSSLNKMERTIDGIMIKEICIKLKVDRLGNISKA

SEQ ID NO: 208 - protein, 1179 aa, Unknown
  Sphaerochaeta globus str.
MSKKVSRRYEEQAQEICQRLGSRPYSIGLDLGVGSIGVAVAAYDPIKKQPSDLVFVSSRIFIPSTGAAERRQKRGQRNSLRHRANRLKFLWKLLAERNLMLSYSEQDVPDPARLRFEDAVVRANPYELRLKGLNEQLTLSELGYALYHIANHRGSSSVRTFLDEEKSSDDKKLEEQQAMTEQLAKEKGISTFIEVLTAFNTNGLIGYRNSESVKSKGVPVPTRDIISNEIDVLLQTQKQFYQEILSDEYCDRIVSAILFENEKIVPEAGCCPYFPDEKKLPRCHFLNEERRLWEAINNARIKMPMQEGAAKRYQSASFSDEQRHILFHIARSGTDITPKLVQKEFPALKTSIIVLQGKEKAIQKIAGFRFRRLEEKSFWKRLSEEQKDDFFSAWTNTPDDKRLSKYLMKHLLLTENEVVDALKTVSLIGDYGPIGKTATQLLMKHLEDGLTYTEALERGMETGEFQELSVWEQQSLLPYYGQILTGSTQALMGKYWHSAFKEKRDSEGFFKPNTNSDEEKYGRIANPVVHQTLNELRKLMNELITILGAKPQEITVELARELKVGAEKREDIIKQQTKQEKEAVLAYSKYCEPNNLDKRYIERFRLLEDQAFVCPYCLEHISVADIAAGRADVDHIFPRDDTADNSYGNKVVAHRQCNDIKGKRTPYAAFSNTSAWGPIMHYLDETPGMWRKRRKFETNEEEYAKYLQSKGFVSRFESDNSYIAKAAKEYLRCLFNPNNVTAVGSLKGMETSILRKAWNLQGIDDLLGSRHWSKDADTSPTMRKNRDDNRHHGLDAIVALYCSRSLVQMINTMSEQGKRAVEIEAMIPIPGYASEPNLSFEAQRELFRKKILEFMDLHAFVSMKTDNDANGALLKDTVYSILGADTQGEDLVFVVKKKIKDIGVKIGDYEEVASAIRGRITDKQPKWYPMEMKDKIEQLQSKNEAALQKYKESLVQAAAVLEESNRKLIESGKKPIQLSEKTISKKALELVGGYYYLISNNKRTKTFVVKEPSNEVKGFAFDTGSNLCLDFYHDAQGKLCGEIIRKIQAMNPSYKPAYMKQGYSLYVRLYQGDVCELRASDLTEAESNLAKTTHVRLPNAKPGRTFVIIITFTEMGSGYQIYFSNLAKSKKGQDTSFTLTTIKNYDVRKVQLSSAGLVRYVSPLLVDKIEKDEVALCGE

SEQ ID NO: 209 - protein, 1370 aa, Streptococcus gallolyticus
MTKKNYSIGLDIGTNSVGWAVITDDYKVPAKKMKVLGNTDKKYIKKNLLGALLFDSGETAEATRLKRTARRRYTRRKNRLRYLQEIFAEEMTKVDESFFYRLDESFLTTDEKDFERHPIFGNKAEEDAYHQKFPTIYHLRNYLADSSEKADLRLVYLALAHMIKYRGHFLIEGKLNAENTDVQKLFTDFVGVYDRTFDDSHLSEITVDVASTLTEKISKSRRLENLIKYYPTEKKNTLFGNLIALALGLQPNFKMNFKLSEDAKLQFSKDTYEEDLEELLGKIGDDYADLFTSAKNLYDAILLSGILTVDDNSTKAPLSASMIKRYVEHHEDLEKLKEFIKANKSELYHDIFKDKNKNGYAGYIENGVKQDEFYKYLKNTLSKIDGSDYFLDKIEREDFLRKQRTFDNGSIPHQIHLQEMHAILRRQGDYYPFLKEKQDRIEKILTFRIPYYVGPLVRKDSRFAWAEYRSDEKITPWNFDKVIDKEKSAEKFITRMTLNDLYLPEEKVLPKHSHVYETYAVYNELTKIKYVNEQGKESFFDSNMKQEIFDHVFKENRKVTKEKLLNYLNKEFPEYRIKDLIGLDKENKSFNASLGTYHDLKKILDKAFLDDKVNEEVIEDIIKTLTLFEDKDMIHERLQKYSDIFTANQLKKLERRHYTGWGRLSYKLINGIRNKENNKTILDYLIDDGSANRNFMQLINDDTLPFKQIIQKSQVVGDVDDIEAVVHDLPGSPAIKKGILQSVKIVDELVKVMGDNPDNIVIEMARENQTTNRGRSQSQQRLKKLQSSLKELGSNILNEEKPSYIEDKVENSHLQNDQLFLYYIQNGKDMYTGDELDIDHLSDYDIDHIIPQAFIKDDSIDNRVLTSSAKNRGKSDDVPSLDIVRARKAEWVRLYKSGLISKRKFDNLTKAERGGLTEADKAGFIKRQLVETRQITKHVAQILDARFNTEHDENDKVIRDVKVITLKSNLVSQFRKDFEFYKVREINDYHHAHDAYLNAVVGTALLKKYPKLASEFVYGEYKKYDIRKFITNSSDKATAKYFFYSNLMNFFKTKVKYADGTVFERPIIETNADGEIAWNKQIDFEKVRKVLSYPQVNIVKKVETQTGGFSKESILPKGDSDKLIPRKTKKVYWDTKKYGGFDSPTVAYSVFVVADVEKGKAKKLKTVKELVGISIMERSFFEENPVEFLENKGYHNIREDKLIKLPKYSLFEFEGGRRRLLASASELQKGNEMVLPGYLVELLYHAHRADNFNSTEYLNYVSEHKKEFEKVLSCVEDFANLYVDVEKNLSKIRAVADSMDNFSIEEISNSFINLLTLTALGAPADFNFLGEKIPRKRYTSTKECLTATLIHQSITGLYETRIDLSKLGEE

SEQ ID NO: 210 - protein, 1044 aa, Unknown
  Nitrosomonas sp.
MLHKMRYRLALDLGSTSLGWAMVRLNANQQPCAVIKAGVRIFSNGRNPKDGSSLAVTRREARSMRRRRDRLLKRKARMMRTLIEYGFFPANETQRKALENLNPYALRAKGLDEALTPSEFARALFHINQRRGFKSNRKTDKKDSDSGALKTAIKQLHSVLDPQGNDGKPRTVGELLYKRFTDLSKLPKDRTVRARYRQDKIVKDDGKTKIDKYYDLYIDRAMIEQEFDALWKKQSELNPILFTENARADLKDVLLYQRSLKPVKPGRCTFMSEEERAPLALPSTQRFRMYQEVNNLRILREGLKEESLTLQQRDDLINALEKNNRRTFTQIKKLLGVGGSVQFNFEDPKREELKGNTTSAILGKSEHFGEAWFAFNEAKQDAIVLQLIKEENEAKLVRWLQDETGIDEKRAEVIANAGLPEGYGSLCIEALARILPELRRDVVTYDKAVQAAGFEHHSKLNRNEEIPDITFKIESIDRNSGEIKQFHLHKELPYYGEYLQRHVGFGSGKPEDSIEKRYGKIANPTVHIGLNQVRVVVNALIKRYGHPSEIIVEVARDLKQSKDRRDEENKRQAENQKRNERLRKDIADILGISEERVRRDDIEKMILWEELSFDPADRRCPYSGVQVSTVMLLSDEVEVEHILPFSQTLDDSLNNKTVALRQANRIKGNRTPWEAFGTSNISGFDYSGILTRAELMPKAKRYRFAEDGYQRWLKDDAGFLARALNDTRHLSKIAREYMSLICPNTRVIPGQMTAMLRRNFGLNDVLGLNGEKNRNDHRHHAVDACVIAVTDQGLLQRFAAASASARERQLNRLVENMPLPWESYREHVRRAIDGIWVSHRPDHSHEGAMHNDTAYGLRGNGRVSFHKMVEGKREYIEDNLKVIEITDTKAIDRHGLLPTGKPRPYKGYKGDSNYCIEIVRNEKGRWEGEIISTFDAYQLVRKYGIVQLRYPVLSVSGKPLVMRLIRNDFVRLEHEGITRTLRVCKMREDGQVALADVTEANVDARTRTKEICYVFKTGGSLQKAKARRITISPIGELRDPGFKE

SEQ ID NO: 211 - protein, 1045 aa, Acidovorax avenae
MQKEKPLAYRLALDLGSTSLGWAVLRLSAPGEPSAVIRAGSRIFSDGRNPKDGSSLAVTRRAARAMRRRRDRLLKRKARMLAALERHGFFPQDEAARKALEKLNPYGLRARGLESALKPEEFGRALFHLNQRRGFQSNRKTDRKDSDSGALKQAIGTLRAQMHESGCRTVGEWFWKVRMERKPEGVKGQGVRARYRETPFTTDEGKKRIDKRYDLYVDRAMVAQEFDALWAAQATFAPALFNEAARAELRDILLHQRKLRPVQPGRCTLVPEEPRALLALPSTQRFRIYQEVNHLRVLHDELREEALTLAQRDQIVALLERQAKVTFTAMRKALGFSALFNLEDAKRDGLKGNATTAALGKKDLFGPLWAGFDTALQDEIVTQLMTEESEPRLIAWLQEHTGVDEARAQAIANAGLPEGYGSLGRTALARIVPELQRDVITYDKAVQAAGFAHHSDLGFSFEHDADEVERIGERTIASTGEIKPVFAFKQLPYYGRALQRHVAFAKENPRNDEERYGKIANPTVHIGLNQVRVVVNALMCRYGRPTEVVIELARDLKQSREQKLEAQQRQADNQKRNARIRRSIAEVLGISEERVRTLDIQKWILWEELSHDAADRRCPYSGVQISASMLLGERVEIEHILPFSMTLDDSLNNRTVALREANRIKRNRTPWDARTDFEAHGWSYDGILQRAERMPQRKRHRFAPDGYERWLGEDKDFLARALNDTRYLSRVAAEYLRLVCPGSATRVIPGQMTALLRGKFGLNDVLGLDGEKNRNDHRHHAVDACVIGVTDQRMMQRFAQANAQAREDGLTRLVEDMPLPWPTYRAHVERAVRHIWVSHKPDHGFEGAMMEETSYGILRDGTIKQRRKADGSAGREISRLIRITEPSQPQRHGVDAEGRPLPYKGYVGGSNYCLEITVNDKGKWEGQVISTFDAYRIVREGGLRQLRHSTQGQNGQALAMRLVIGDSVRLEVDEQERVMRIVKINGNNGQVFMAPVHEANVDARNSDKNEAFAYTSKIAGSFQKTKARQVTISPIGELRDPGFKG

SEQ ID NO: 212 - protein, 1218 aa, Prevotella denticola
MKASEEKLSKGLSTYMKENNLLTVGAAFAQLEDEGVRIRNNNNYRAIRSQFQHEIETIFMFQQGLSENELYERLVSEKKNIGTIFYKRPLRSQRGNVGKCTLERTKPRCAIGHPLFEKFRAWTLINNIKIRMSEEEQAEQLPMKLRFELYNDCFLAFVRAEFKFEDIRKYLEKRLGVHFSYNDKTINYKDSTSVAGCPITARFRKLLGEDWESFHVDGQKQRQAHGKNNASFHTVSYSTNDIWHFCYDAEEPEAVLSFAQDNLKWEKKKAEELVRIWSAIPQGYAMLSQKAIRNINKMLILGLKYSDAVLLAKVPEIVEITDGEILSVTEDYHRVEAQVGYEKQINNIVNALIAKYKSASEEYRFADHNYEYQLDKSDEKDIIKQIESNIGTRKWSLLDADEQTDILQKVRDKYQNFFRSHERKFVESPKLGECFEEYLMKKFPMVEGEQWKKLYHPSQIAIYRPVSAGKDRSALRLGNPDIGAIKNPTVLRVLNTLRKRVNQLLDDGLISPDETRVVVETARELNDANRKWALDNYNRIRHDENEKIKKILEEFYPKRDGISTDDIDKARYVIDQREMDYFTEEKPYNKDIKKYKLWLEQGGQCMYTGRTINLSNLFDPNSFDVEHTIPESISFDSSDMNLTLCDAHYNRFIKKNHIPADLPNYDKSVVIDGKEYSPIKPRLQRWADRVERLNRNVEYWRGQARRAQNKDRKDQCMREMHLWKMELEYWTKKLERFTITEVTDEFKNSQLVDTRVITRHAVLYLKSIFPHVDVQRGDVTAKFRKILGIQSVDEKKDRSLHSHHAIDATTLTIIPGAAKRERMLELFAKIEEVNKMLSFSGNEDRTGLKQELDGLKNQLNKEVKACRIGHNVSEIGTFINDNIIINHHVKNQALTPVRRRLRKRGHIVGGMDNPRWQTGDALRGEIHKASYYGAITQFAKDKDGKVLLKEGHPLVDPTIKFVIRRELKYKKSTADSGFASWDDLEKAIVDKELFALMKGQFPEETSFKDACEQGIYMIKKGKNGEVDTKLYRIRHIRCKTKQKNALKIKEQAYKSEKEYKRYFYAAVGDLYAMCCYTNGKTREFKIYSLYDISCHRKVGVEDIPEFITDKKGNRLMLDYKLHTGDMILLYKENPEELYDLDNVSLSKLLYKINGFENDGLRIRMVNHLVAKEAMGESVKDYAKLPDIIRCGVKTIKFLVMGENRDFVIKNGKISFNHR

SEQ ID NO: 213 - protein, 1458 aa, Fluviicola taffensis
MTKTILGLDLGTNSIGWALINQDFDNKKGEILGMGSRIIPMTQDIKDEFGKGNSISQTAERTRLRGVRRLIHRTLLRRERLHRVLNIIGFLPEHYANQIDFEKRFGKFKPESEPKISFDGNDVFLFEKSYQEMLVDFKIHQPQLVSNGKKIPHDWTIYYLRKKALSKKIEKEELAWILLNFNQKRGYYQLRGEEEEETPNKLVEFHSLKIVEVNADEPQKGKPEIWYSLVLENGWVYRRASKTPLFDWKDKIREFIVTTEINNDGTVKTDKEGTEKRSFRAPKPEDWTLQKKKTEFELSKSGNEVGAFIYESILQKPNQKIRGKLISTIERKFYKEELKTILKTQLFFHKELKDEKLYNACIEELYKNNEAHRSLLSNKGFEHLFINDILFYQRPLRSKKSQISNCPLEKRTYKKEGIEITEGIKVISKSNPIYQEFRLWQWISNLSLYCIEPTETNVTSTFLNSIEDYENLFEFLNNRKEIEQKHLLKYLLENQGFKGKLLTNELEKFRWNFVADKKYPCNETGSLLHTRLSKVKNISPDFLTKEIEHQLWHIIYSVTDKIEYEQALKTFARKNNLDVDSFFEHFKKIPPFESTYGAYSEKAIKKLLPLIRLGKYWNWEAIDSISKDRISKILSGEYDENIKNRVREKAVHLTSENNFQGLQEWLAKYIVYDRHSEGNDLGKWTSVSDLETYLKEFKQHSLRNPIVEQVITETLRVVKDIWIKHGKGTENFFDEIHVELGREMKNNSEDRKRLTNTITENENTNLRIKALLMEMMNDNDVENVRPYSPSQQEILKIYEDGALNSNIELDDEIVKISKKAEPTKSELQRYKLWLEQKYRSPYTGQVIPLNKLFTSEYEIEHVVPQSRFFDDSFSNKVICESAVNKRKDNQLGLQFIKNHSGEKVELGFGKVVQVFTEEQYLDFVKEHYSKNRSKHNKLLLEEIPEKMIERQLNDTRYISKFVSSILSNIVRSEKDDDGLNSKNILPGNGKITTELKRDWGLNDVWNDLILPRFERMNTITNSDLFTTYNDKYQKHLPTVPFEYSKGFQKKRIDHRHHAMDALVIACATRDHLNLMNNQSAKSELKRYDLQNKLRKKEPYFNQKENKQKEAFKDFIKPWGTFTEDSKNALEKIIISFKQNLRVINKATNSYESYKDEDGNLRIGKDGKPEKGLIKQKGLNWAIRKPLHKDTVSGQINLSRIKLPNGKILTATRKNLDTSFDLKTIENSITDTGIQKILKNYLLSKESPELAFSPEGLEEMNNEIEKYNNGKFHHPINKARIYELGSKFNVGQTGNRRDKFVEAAKGTNLFFAIYQDENKNRSYETIPLNEVIEHQKWRASLPKEEQEKIPLVPVNKLKGTFIFSLSPNDLVYVPSNDELERSASIDFSKLKKEQINRLYKMVSSSGSQCFFVKSEVATSVVNKMEYSSLNKMEKSIDNLMVKEICIKLKIDRLGNISKA

SEQ ID NO: 214 - protein, 1384 aa, Coriobacterium glomerans
MKLRGIEDDYSIGLDMGTSSVGWAVTDERGTLAHFKRKPTWGSRLFREAQTAAVARMPRGQRRRYVRRRWRLDLLQKLFEQQMEQADPDFFIRLRQSRLLRDDRAEEHADYRWPLFNDCKFTERDYYQRFPTIYHVRSWLMETDEQADIRLIYLALHNIVKHRGNFLREGQSLSAKSARPDEALNHLRETLRVWSSERGFECSIADNGSILAMLTHPDLSPSDRRKKIAPLFDVKSDDAAADKKLGIALAGAVIGLKTEFKNIFGDFPCEDSSIYLSNDEAVDAVRSACPDDCAELFDRLCEVYSAYVLQGLLSYAPGQTISANMVEKYRRYGEDLALLKKLVKIYAPDQYRMFFSGATYPGTGIYDAAQARGYTKYNLGPKKSEYKPSESMQYDDFRKAVEKLFAKTDARADERYRMMMDRFDKQQFLRRLKTSDNGSIYHQLHLEELKAIVENQGRFYPFLKRDADKLVSLVSFRIPYYVGPLSTRNARTDQHGENRFAWSERKPGMQDEPIFPWNWESIIDRSKSAEKFILRMTGMCTYLQQEPVLPKSSLLYEEFCVLNELNGAHWSIDGDDEHRFDAADREGIIEELFRRKRTVSYGDVAGWMERERNQIGAHVCGGQGEKGFESKLGSYIFFCKDVFKVERLEQSDYPMIERIILWNTLFEDRKILSQRLKEEYGSRLSAEQIKTICKKRFTGWGRLSEKFLTGITVQVDEDSVSIMDVLREGCPVSGKRGRAMVMMEILRDEELGFQKKVDDFNRAFFAENAQALGVNELPGSPAVRRSLNQSIRIVDEIASIAGKAPANIFIEVTRDEDPKKKGRRTKRRYNDLKDALEAFKKEDPELWRELCETAPNDMDERLSLYFMQRGKCLYSGRAIDIHQLSNAGIYEVDHIIPRTYVKDDSLENKALVYREENQRKTDMLLIDPEIRRRMSGYWRMLHEAKLIGDKKFRNLLRSRIDDKALKGFIARQLVETGQMVKLVRSLLEARYPETNIISVKASISHDLRTAAELVKCREANDFHHAHDAFLACRVGLFIQKRHPCVYENPIGLSQVVRNYVRQQADIFKRCRTIPGSSGFIVNSFMTSGFDKETGEIFKDDWDAEAEVEGIRRSLNFRQCFISRMPFEDHGVFWDATIYSPRAKKTAALPLKQGLNPSRYGSFSREQFAYFFIYKARNPRKEQTLFEFAQVPVRLSAQIRQDENALERYARELAKDQGLEFIRIERSKILKNQLIEIDGDRLCITGKEEVRNACELAFAQDEMRVIRMLVSEKPVSRECVISLFNRILLHGDQASRRLSKQLKLALLSEAFSEASDNVQRNVVLGLIAIFNGSTNMVNLSDIGGSKFAGNVRIKYKKELASPKVNVHLIDQSVTGMFERRTKIGL

SEQ ID NO: 215 - protein, 1077 aa, Neisseria bacilliformis
MQQKPQRYILGLDLGIASVGWACVWADENEHPTGLLDCGVRTFERAEVPKTGDSLALARRQARSVRRLIRRRAHRLLRLRRLLKREGVLLSADFNENGLVRGLPIDAWALRVAGLDRKLSNKEWAAVLLHLVKHRGYLSQRKNETQSKDKELGRLLAGVNGNREALQNRSDEYRTAAELAVKKFAAENNGSLRNKGGDYSHTFDRKDLQRELHLLFERQRALDNPFTSSEMEAAVDELLMKQRSALQGEAVLKMLGRCTFEPSEYKAAKNTYSAERFVWLTKLNNLRIQYNGEERALSEAERRLLLDEPYQKAKLTYKQVRTILELPESAVFKGLRYGHGEDGLKAESGTLMEMKAYHAVRKALKDAGLEGEWENRIRNPELLDAIGTAFSLYKTDEDIRANLAAFRLSENVLEALLAGLNFDKFVHLSLKALAKILPLMEQGMRYDEACKEAYGDHYGAKEQEDHRLLPPFVADDIRNPVVFRTLTQARKIVNEIVRRYGSPLRVHIETGREVGKSFSDRKEIEKRQEENRKERERAAAHFKELFPNFAGEPKAQDILKLRLYEQQHGKCLYSGKEIDLRRLPEKGYVEIDHALPFSRTWDDSFNNKVLVLGKENQDKRNRTPYEYLDGKGNSGAWRAFAERVSGCRFPYAKKQRLLTQKLDEKTEQGFLERNLNDTRYVARFLCQFIEEKMHLEGAGKKRVFASNGQITALLRGFWGLKKVREENDRHHALDAVVVACSSVSMQQKITRHFRYREELEHIDRETGEVIHGFPQPWEFFRQEVMTRVFSDDPVSELAEKLDSRPEAVHEFVTPLFVSRAPHRKVTGQGHLETIRSAKRLDEKISVVKLPLTQLKTKDIERIVGYPNREPALYDALAARLAAFKDDPAKAFSEPFYKTGKDGKCGVLVKAVRVENVQKSGLLVRKDESGKMQGVADNATMVRVDVFGKNGKNYLVPVYAWQVEKGELPNRAVVAYADEEDWDEMDDSFEFKFSLYPNDLVEVVTKKDKFFGYYSGFNRATGAINIKEHDLSKSKVKNGVYEGIGVKTAQSFQKYQVDTLGKTIRLCKPEKRMGFKKK

SEQ ID NO: 216 - protein, 1029 aa, Alicycliphilus denitrificans; identical to SEQ ID NO: 193

SEQ ID NO: 217 - protein, 1122 aa, Streptococcus suis; identical to SEQ ID NO: 87

SEQ ID NO: 218 - protein, 1428 aa, Parasutterella excrementihominis
MGKTHIIGVGLDLGGTYTGTFITSHPSDEAEHRDHSSAFTVVNSEKLSFSSKSRTAVRHRVRSYKGFDLRRRLLLLVAEYQLLQKKQTLAPEERENLRIALSGYLKRRGYARTEAETDTSVLESLDPSVFSSAPSFTNFFNDSEPLNIQWEAIANSPETTKALNKELSGQKEADFKKYIKTSFPEYSAKEILANYVEGRRAILDASKYIANLQSLGHKHRSKYLSDILQDMKRDSRITRLSEAFGSTDNLWRIIGNISNLQERAVRWYFNDAKFEQGQEQLDAVKLKNVLVRALKYLRSDDKEWSASQKQIIQSLEQSGDVLDVLAGLDPDRTIPPYEDQNNRRPPEDQTLYLNPKALSSEYGEKWKSWANKFAGAYPLLTEDLTEILKNTDRKSRIKIRSDVLPDSDYRLAYILQRAFDRSIALDECSIRRTAEDFENGVVIKNEKLEDVLSGHQLEEFLEFANRYYQETAKAKNGLWFPENALLERADLHPPMKNKILNVIVGQALGVSPAEGTDFIEEIWNSKVKGRSTVRSICNAIENERKTYGPYFSEDYKFVKTALKEGKTEKELSKKFAAVIKVLKMVSEVVPFIGKELRLSDEAQSKFDNLYSLAQLYNLIETERNGFSKVSLAAHLENAWRMTMTDGSAQCCRLPADCVRPFDGFIRKAIDRNSWEVAKRIAEEVKKSVDFTNGTVKIPVAIEANSFNFTASLTDLKYIQLKEQKLKKKLEDIQRNEENQEKRWLSKEERIRADSHGICAYTGRPLDDVGEIDHIIPRSLTLKKSESIYNSEVNLIFVSAQGNQEKKNNIYLLSNLAKNYLAAVFGTSDLSQITNEIESTVLQLKAAGRLGYFDLLSEKERACARHALFLNSDSEARRAVIDVLGSRRKASVNGTQAWFVRSIFSKVRQALAAWTQETGNELIFDAISVPAADSSEMRKRFAEYRPEFRKPKVQPVASHSIDAMCIYLAACSDPFKTKRMGSQLAIYEPINFDNLFTGSCQVIQNTPRNFSDKTNIANSPIFKETIYAERFLDIIVSRGEIFIGYPSNMPFEEKPNRISIGGKDPFSILSVLGAYLDKAPSSEKEKLTIYRVVKNKAFELFSKVAGSKFTAEEDKAAKILEALHFVTVKQDVAATVSDLIKSKKELSKDSIENLAKQKGCLKKVEYSSKEFKFKGSLIIPAAVEWGKVLWNVFKENTAEELKDENALRKALEAAWPSSFGTRNLHSKAKRVFSLPVVATQSGAVRIRRKTAFGDFVYQSQDTNNLYSSFPVKNGKLDWSSPIIHPALQNRNLTAYGYRFVDHDRSISMSEFREVYNKDDLMRIELAQGTSSRRYLRVEMPGEKFLAWFGENSISLGSSFKFSVSEVFDNKIYTENAEFTKFLPKPREDNKHNGTIFFELVGPRVIFNYIVGGAASSLKEIFSEAGKERS

SEQ ID NO: 219 - protein, 1371 aa, Lactobacillus buchneri
MKVNNYHIGLDIGTSSIGWVAIGEDGKPLRIKGKTAIGARLFQEGNPAADRRMFRTTRRRLSRRKWRLKLLEEIFDPYITPVDSTFFARLKQSNLSPKDSRKEFKGSMLFPDLTDMQYHKDYPTIYHLRHALMTQDEKFDIRMVYLAIHHIVKYRGNFLNSTPVDSFKASKVNFVDQFKKLNELYTAINPEESFQINLANSEDIGHQFLDPSIRKFDKKKQIPKIVPVSVDDKATDKINGKIASEIINAILGYKSKLDVVVQCTPVDSKSWALKFDEEDIDAKLQKILPEMDENQQSIIAILQNLYSQVTLNQIVPNGMSLSESMIEKYNDHHDHLKLYKKIIDQLADPKKKAALKKAYSQYVGDDGKVIEQADFWSSVKKNLDDSDLSKQIMDLIDAEKFMPKQRTSQNGVIPHQLHQRELDEIIEHQSKYYPWLAEINPNKHDLHLAKYKIEELVAFRVPYYVGPMITPDDQAKSAETVFSWMERKGKEAGQITPWNFDEKVDRNASANRFIKRMTTKDTYLIGEDVLPDESLLYEKFKVLNELNMVRVNGKLLKVADKQAIFQDLFENYKHISVKKLQNYIKSKTGLPSDPEISGLSDPEYFNNSLGTYNDFKKLFGNKVDEPDLQDDFEKIVEWSTVFEDKRILREKLNEITWLSDQQKDVLESSRYQGWGRLSKKLLTGIVNDQGERIIDELWNTNKNFMQIQSDNDFAKRIHEANADQMKAVDVEDVLADAYTSPQNKKAIRQVVKVVDDIQKAMGGVAPKYISIEFTRSEDRNPRRTISRQRQLENTLKDTAKSLAKSINPELLSELDNAAKSKKGLTDRLYLYFTQLGKDIYTGKPINIDEISTYDIDHILPQAFVKDDSLNNRVLVSKAINNGKSDNVPVQLFGAKMGHFWKQLAEAGLISKRKLKNLQTDPDTISKYAMHGFIRRQLVETSQVIKLVANILGDKYRNDNTKIIEITARMNHQMRDEFGFIKNREINDYHHAFDAYLTAFLGRYLYHRYIKLRPYFVYGDFKKFKEDKVTMRNFNFLHDLTDDTQEKIADAETGEVIWDRENSIQQLKDVYHYKFMLISHEVYTLRGAMFNQTVYPASDAGKRKLIPIKADRPINVYGGYSGSADAYMAIVRIHNKKGDKYRVVGVPMRARDRLDAAKKVSDADCDRALKDVLTPQLTKTKKSRKTGEITQVVEDFEIVLGKVMYRQLMIDGDKKFMLGSSTYQYNAKQLVLSDQSVKTLASKGRLDPLQESMDYNNVYTEILDKVNQYFSLYDMNKFRHKLNLGFSKFISFPNHNVFDGNTKASSGKREILEEVLNGLHANPTFGNLKDIGITTPFGQLQQPNGILLSDEAKIRYQSPTGLFERTVSLKDL

SEQ ID NO: 220 - protein, 1090 aa, Unknown
  Sphingomonas sp.
MDWRLGLDLGANSLGWAALRLDRAGDPIGILAMGSRIFSDGRDPKSGASLAVDRRAARAMRRRRDRFKQRQAALLKYLIRDGLFPADQADRQRLADEDPYALRARALDEELSLFEIGRALFHLNQRRGFQSNRKADRGQDDEAGKIAVGVDRLNQQMEEQGARTLGEFLHQRRRAATDANHIPSVRTRLRPETGEGAKGDGYDFYPSRALIAEEFEEIWAAQAPHYPDTLTQQVHDRLYEIIFHQRPLRAPQVGQCTLVAGETRLPKAHPLFQKRRLLEEINALMIVRPGEIAQRLTPEERDTLYLKLKDKRTVSFATLRKTLKLDSAARFNKESENRTELKGDEVAAELGAKTRLGTRWQHLSGDQQWEVVHRLMALESQADEAAFRDWISQTYDLLPEQAAAVLGARLPQGHGRFGPTATTTLIDSLLHDRTEDGRVVVYSEAVQRSGLGHHSDLRHDRDDEDVTELPYYGVALERHIMPGTAEPTDPEEMRIGRLTNPTVHIGLNQLRHVVNRLIRAYGPPKEIAIELARELKLSEDEKKKRNSENRDNRLAAEGRSKKLEEIRQRDTGANRALLKLWEELNPGNVLDRRCIYTGEQISIDMLFSDRVEVDHILPFAQTLDDSNGNKLLCLREANREKRRRSPYEAWGHTDRWPDIAERASRLPKPKRWRFEPDAMQRFATEDGFLARHLVDTQYLGRLAREYLSWLYPGRGEGSGHVWVSPGRLTEMVRRKLGLNDLLPDHNFGGGADQPKNRLDHRHHAIDALVVAIVDRGMLQAIARASGQDGSEGRERIHIPAPWDGFRDDLRVAVNGIIVSHRPDHGTVAKAGLARGRDQTAGRLHNDTAYGLTGETDAKGNSIVVRRIPLSAIKKPADIARVRDPLLRNALAEFTKGLDGKAFEARIGRFHELGPLLYRGIRRVRVVETLTVIPIRDAEGRAYKGYKGDSNYRYDVWEMPDGKWRCQVVSMFDAHQSTEQARPHPAARKILSLQRNDILAIERTEGDRELVRVVKFSEKQFAVAPPHEGGSLKTRDGNADDPFRYLYPSPNTLKGWRARQVRIDELGRVLDPGFPARKSVRRTRPRAAPVD

SEQ ID NO: 221 - protein, 1000 aa, Kingella kingae
MARAQRRLISRRANRMNKLRRLLKQENVLQANDYDEKGLIIGLPNQAWELRAQGLDRKLEPKEWAAVLINLVKHRGYLSQRKNESQTADKELGALLSGMNHNHQLLQSQSNQYRTPAELAIKQFATQDGHIRNQRGAYTHTFNRLDLQNELNQLFDAQTRLGNPHVSGSLKTAINDLLMNQKAALSGDAILEMLGRCTFEPSEYKAAKNTYSAERFVWLGKLTNLRIQDNGLESALSREQRELLLNEPYNKTKLTYQQVRKLLRLPETAFFKGLRYGKDNAESATFMEMKSYHAIRKSLENKSLKSEWEKLKTQPKLLDLIGTAFSIYKTDDEIAGCLKNQLPENVIIALQEQLNFSNFMELSLKALEKLLPLMEQGLRYDEACTQIYGNRHEKIADKTEKFLPNIPADKLRNPVVLRTLTQARKVINAIIRRYGSPARVHIETGREVGKSFSDRDKLKKQQEENQEQRRRAIDEWKQFFPNAAHEPKAVDILKLRLYQLQQGKCLYSGLPIDVRRLPEKGYVEIDHALPFSRTWDDSFNNKILVLASENQNKGNQTPYEYLRGADNSESWRLFVENVQNCQFSPNKKQKIMAKQLDEKGFLERNLNDTRYVSRFLCQFISEHLHLTGKGKKRVFASNGQITALLRGRWGLSKNREENDRHHAVDAVVVACSTVAMQQKITQFVRYQKGNVFTGERIDKETGEVISIHFPTPWEHFREEVMIRVFDDNPLRTLPEKLPNRPEALHEYVMPLFVSRMPTRKMTGQGHKETIKSAKRLDEKISVLRVPLTQLKLNDLENMVNREREPALYEALKARLEQFKNDPAKAFAEPFFKQGGQQVKAVRVEIVQKSGMLLRKINGVADNGSMVRVDVFEKSGKFYLVPIYAWQVAEGILPNYAVVAHKDESDWILMDESYHFKFALYKNDLLEVQTKKGGIMGYFASLDRATGAITIREHDRDKKKCKDGEHRSIGVKMASSFKKLQVDELGKNIHETRSRKRPNIG

SEQ ID NO: 222 - protein, 1130 aa, Streptococcus pasteurianus
MTNGKILGLDIGIASVGVGIIEAKTGKVVHANSRLFSAANAENNAERRGFRGSRRLNRRKKHRVKRVRDLFEKYGIVTDFRNLNLNPYELRVKGLTEQLKNEELFAALRTISKRRGISYLDDAEDDSTGSTDYAKSIDENRRLLKNKTPGQIQLERLEKYGQLRGNFTVYDENGEAHRLINVFSTSDYEKEARKILETQADYNKKITAEFIDDYVEILTQKRKYYHGPGNEKSRTDYGRFRTDGTTLENIFGILIGKCNFYPDEYRASKASYTAQEYNFLNDLNNLKVSTETGKLSTEQKESLVEFAKNTATLGPAKLLKEIAKILDCKVDEIKGYREDDKGKPDLHTFEPYRKLKFNLESINIDDLSREVIDKLADILTLNTEREGIEDAIKRNLPNQFTEEQISEIIKVRKSQSTAFNKGWHSFSAKLMNELIPELYATSDEQMTILTRLEKFKVNKKSSKNTKTIDEKEVTDEIYNPVVAKSVRQTIKIINAAVKKYGDFDKIVIEMPRDKNADDEKKFIDKRNKENKKEKDDALKRAAYLYNSSDKLPDEVFHGNKQLETKIRLWYQQGERCLYSGKPISIQELVHNSNNFEIDHILPLSLSFDDSLANKVLVYAWTNQEKGQKTPYQVIDSMDAAWSFREMKDYVLKQKGLGKKKRDYLLTTENIDKIEVKKKFIERNLVDTRYASRVVLNSLQSALRELGKDTKVSVVRGQFTSQLRRKWKIDKSRETYHHHAVDALIIAASSQLKLWEKQDNPMFVDYGKNQVVDKQTGEILSVSDDEYKELVFQPPYQGFVNTISSKGFEDEILFSYQVDSKYNRKVSDATIYSTRKAKIGKDKKEETYVLGKIKDIYSQNGFDTFIKKYNKDKTQFLMYQKDSLTWENVIEVILRDYPTTKKSEDGKNDVKCNPFEEYRRENGLICKYSKKGKGTPIKSLKYYDKKLGNCIDITPEESRNKVILQSINPWRADVYFNPETLKYELMGLKYSDLSFEKGTGNYHISQEKYDAIKEKEGIGKKSEFKFTLYRNDLILIKDIASGEQEIYRFLSRTMPNVNHYVELKPYDKEKFDNVQELVEALGEADKVGRCIKGLNKPNISIYKVRTDVLGNKYFVKKKGDKPKLDFKNNKK

SEQ ID NO: 223 - protein, 1119 aa, Lactobacillus coryniformis
MGYRIGLDVGITSTGYAVLKTDKNGLPYKILTLDSVIYPRAENPQTGASLAEPRRIKRGLRRRTRRTKFRKQRTQQLFIHSGLLSKPEIEQILATPQAKYSVYELRVAGLDRRLTNSELFRVLYFFIGHRGFKSNRKAELNPENEADKKQMGQLLNSIEEIRKAIAEKGYRTVGELYLKDPKYNDHKRNKGYIDGYLSTPNRQMLVDEIKQILDKQRELGNEKLTDEFYATYLLGDENRAGIFQAQRDFDEGPGAGPYAGDQIKKMVGKDIFEPTEDRAAKATYTFQYFNLLQKMTSLNYQNTTGDTWHTLNGLDRQAIIDAVFAKAEKPTKTYKPTDFGELRKLLKLPDDARFNLVNYGSLQTQKEIETVEKKTRFVDFKAYHDLVKVLPEEMWQSRQLLDHIGTALTLYSSDKRRRRYFAEELNLPAELIEKLLPLNFSKFGHLSIKSMQNIIPYLEMGQVYSEATTNTGYDFRKKQISKDTIREEITNPVVRRAVTKTIKIVEQIIRRYGKPDGINIELARELGRNFKERGDIQKRQDKNRQTNDKIAAELTELGIPVNGQNIIRYKLHKEQNGVDPYTGDQIPFERAFSEGYEVDHIIPYSISWDDSYTNKVLTSAKCNREKGNRIPMVYLANNEQRLNALTNIADNIIRNSRKRQKLLKQKLSDEELKDWKQRNINDTRFITRVLYNYFRQAIEFNPELEKKQRVLPLNGEVTSKIRSRWGFLKVREDGDLHHAIDATVIAAITPKFIQQVTKYSQHQEVKNNQALWHDAEIKDAEYAAEAQRMDADLFNKIFNGFPLPWPEFLDELLARISDNPVEMMKSRSWNTYTPIEIAKLKPVFVVRLANHKISGPAHLDTIRSAKLFDEKGIVLSRVSITKLKINKKGQVATGDGIYDPENSNNGDKVVYSAIRQALEAHNGSGELAFPDGYLEYVDHGTKKLVRKVRVAKKVSLPVRLKNKAAADNGSMVRIDVFNTGKKFVFVPIYIKDTVEQVLPNKAIARGKSLWYQITESDQFCFSLYPGDMVHIESKTGIKPKYSNKENNTSVVPIKNFYGYFDGADIATASILVRAHDSSYTARSIGIAGLLKFEKYQVDYFGRYHKVHEKKRQLFVKRDE

SEQ ID NO: 224 - protein, 1126 aa, Lactobacillus farciminis
MADRISLGLDIGVASVGFSVLDIDKGKVIELGARLFSATVAAGNQDRRDMRGARRLLNRNKQRRQDTGKLFKKFGLIDDFDKGSFYDNFNQNLNPYELRVKGLTEQLTKEELAESLYQIVKHRGISYALKDADVDEGGTDYSVSLKINSQELAEKTPAQIQLQRLNDYGKVRGQVVIGDDPDNQKVLLNVFPTSAYEKEAKQIIATQQQFYPESLTDKFTEEYCQILTRKRDYFVGPGNEKSRTDYGIYKTDGRTLDNLFEELIGHDKIYPEELRASAASYTAQLFNVLNDLNNLRILNYEDGKLTKEDKEKIIAEIKNNTTTINMLNVIKKVAGCSKDDIKGFRVNEKDKPEISSMPVYRKIHKDLLKAGVDISDWPVEFIDELSFILTLNTENGEIRKQLNNRLAPKFDFLNADLIQLIIDNKDSFEIKTNNKWHRFSVKTMNKLIPEMMERPVEQMTLLNEMGLVKKDKKRFENNKYLPYKEIAKDIFNPVASKSVREALKIVNAVLKKYGHIDYLVVEMPRDKNLKEEQDNIKEFQNKNKKAKDAAFEAFVKSVGSEQRVKEALSKNRKLQMKMRLWYQQQEIDPYNGKTIDATDLINNPDKFEIDHIIPQSISFYDSINNKTLCFASMNQVKGQKTPYEFMLEGHGQSYDKFKATVMANKNFGKAKRANYLFEENVSDIETRKRFLSRNLVDTRYSSRVVLNSLQDFFREKSADTKVTVIRGKFTSNMRKHWHIDKTRETFHHHAIDASIIAATPFLRMWKKGGTIFPVKVGEESIDIETGEILDDKNFDKAMYEEPYSGFVSEIMNADDRIKFSHQVDKKMNRKVSDATIYSTRTGKLAKDKKDAEYIVAKVKDIYSVDGFKKFKKVYDKDKTKFLLYKYDPRTFSKLERIISDCPDKVEKVQTNGKVKAVDISPFEMYRRDHGMIKKYSKKGNGPAIKQLKYLDKKLGSHIDITPANANGKHVILQSLKPWRTDVYLNHETGEYEIMGIKYSDLKFNKNEGYGIKKDKYLEIKKVEEVSEKSEFMFSLYRKDRVKVQDMKTGESVELLFWSRNFSNKKYAELKPISQAENDKKLPVYGKGRLIKRLIPKNCKIWKVNTTILGDPYYLEKESDSPKDILD

SEQ ID NO: 225 - protein, 1380 aa, Unknown
  Eggerthella sp.
MNLRHVGNYNIGLDMGTASVGWAAIDEQGELLHFKGKPTWGSRLFDSANTAATARMPRGQRRRYIRRRWRLDLLQKFFSEEMAEKDPEFFIRLRQSSLWPEDREGGHTAYHWPLFNDSDFNEKEYYEKFPTIFHLRQWLMETDEKADIRLIYLAFHNIVKHRGNFLQENNDSLSAQNANMRESLESFCIALEEWCDEKELTCSCDPQKLEHLFKEVKYRSDIRDGFAALLGLACSGENEVDVKAMAKEMGKAIVGYKADFSKIFTECDKEGSSFRLSDDEGPEAFLDICPDDGIALFEAIQMVYSSFILTGMLTEKGLSLSKISAYNQYGQDLESLKALVKEYVPNEYSSFFRGPTYSGSTEYDPSKAQGYTRYNLGPSKKGSGAKPMAYEDFKKSVEQLFANTNAINDERYKEMMGRFAEEKFLRRLRTSDNGRIPFQLNLEEMTAIIINQGKYYPFLLEQQEKLESLVRFRIPYYVGPLTRINARLDSKGNACFAWSKRKDGMDSASIKPWNWDEVIDKHASAQAFIERMTGTCTYLRGEPVLPRCSLLYEEYCVLNELNGARWTQDGDKFIRFDYKDRSDIIEELFKKRRGRIQYAAVADWMKQERSHANVHVSGGQGENAFESRLSSYHFFCNDVFGVDELPGSYVDMVEEIILWSTLFEDRSILREEIQRKYGDVLNEEQIKTICKKRFSGWGRLSRKLLCSLKAQTDNGPKSIMDILQEGDQNNGRVGRAMVFQEILHDEQLGFEQKIEEENTQSMLEGENLLIEDLPGSPAIRRSINQAVRIVDEIVGIAGHAPDNIFIEVTREDDTKKKGKRTTTRYSNIQKALEALKEEGAEALRELKTYKHNELDKRLSLYFMQNGKSLYSGIPLDIRRLSEYQIDHIIPQSYIKDDSYENMALVLPGENQSKADNLLISQDIRIKMKATWTALHKAGLMGDKKYNNLMNSSISDAKMKGFINRQLVETSQSVKLTQMMLSQKYPGAKVRPIKASISSQLRDACDLVKCREANDYHHAHDAYLACQVGRFVLKRHSSMFDNPIGMTKVIRDFVKRQGQEFKRNGKLPAYASRSGFIVQSFMRSGFDAETGELLRDDWNAPFEIARIKRCLNYRDCYISRMPMEDSGAFWDATIYSPKAGKKGALPVKQGLPVEKYGSYSREQFAYFFVYKAYNPKKKAYRLEFEAVPVRVASAVETRENALEEYAKSVAKQAGLEFVEVARPKVYKYQLIELGEDRLYITGKREVRNASQLAFSLDEIDLLKRLAEGEETSSEERERLFDVLIEKYARYAPRLARQLSVDSMSATFETLNAEEQLGILLSLVEIANGKRNMIDLSSAGGSKNAGCMNPTFSSELSSPGSNFTFIDQSVTGMFERRQRLEL

SEQ ID NO: 226 - protein, 1430 aa, Capnocytophaga canimorsus
MKHILGLDLGTNSIGWAVVKEAQNDNEQSEIVDVGVRVNPLTTDEKTNFEKGKPISTNADRTLKRSARRNLQRYKLRRKELIELLKEHQLISTDTILTENGKGTTFQTLELRAKSAKEKISLEELARVFLTINKKRGYKSSRKAKNEDEGQLIDGMEIAKRLYEENLTTGQLSLQLLKEGKKSLPDYYRSDLQFELDKVWNFQKQFHSHILTDEFYAQLKGKGQRATSALFLAKYQIYTAENKGSREDKKLQAYQWRVDALSKELTREQLAFVITEINNNLNNSSGYLGAISDRSKELYFNNETVGEYLWKQIAANPHTSLKNQVFYRQDYLDEFEQIWKTQSAFYPEILTDELKKELRDVVIFYQRKLKSQKSLVSFCEFENKEIEIKKEDGTSTKKVIGLKVAPKSSPLFQEFKIWQNLNNVLIRKKGSKTKKVDKNQQAVLFEEEKTIFELDLEAKQALFNELNLKGNLKAYYCLEILGYSPKEWEMNYSVLEGNRTNKALYEAYLKITDLEGYDAKNHLKVKLNKDEVELDDLKVPASEIKDMVQAIFKEAGINTDILHFNAELDGKDFENQASYQLWHLLYSYEGDDSKSGNELLYKLLETKFGFKKEYAQILANVSLSDDYGSLSTKAMRKIHPYIKENKFSTACELAGYRHSKHSLTKEENDNRVLKDSLEVLKKNSLRQPVVEKILNQMINLVNALLKKYRTENPNFKFDEIRIELARELKKNAEERANMTVNINKAKTEHEKIIKILKNEFGLPNPTRNDIIRYRLYEELKANGYKDLYTNEYIEKQDLFTKNIDIEHIIPKSRVFDDSFSNKTLSFRKTNLDKGERTAFDYIESKFGADKLEEYVARVEDLYKNNIISKAKYQKLLKKESEIGDGFVERDLRETQYIAKKAKEILLQITPNVLSTSGGITDRLREDWDLINVMKELNLPKYRALGLTQMEDRKYGQQVEVIIDWTKRNDHRHHAMDALTVAFTKHNHIQYLNYLNARKNEKHREHSNIMGIQQLETIKVTDKNGNEKRVFKAPMPNFRQVTKAFLENVLISHKAKNKVVTKNKNKVAGSNKVQEVLTPRGQLHKETVYGKYQYYVQKEEKIGGKFDLETIKKVANPLYQSLLKKRLEENGGDPKKAFTGKNSLAKNPIYLDDAQTEQLPEKVKLVWLENSFSIRKDITPENFKDEKLIDKILDEGVKRILKERLQSFGNDAKKAFSDLDKNPIWLNKEKGIAIKRVAISGVANAEPLHTKKDHLGKEILDKEGKSIPVDFISTGNNHHVAVYRDEKGNLQEKVVSVFEAVVRANQGLPIIDKTYNQHLGWEFLFTMKQNEMFVFSNESTGFNPNDIDLLDPKNKKIISPNLFRVQKFSKLQYGNSFVREFVFRHHLETTVEDRKELQGITYKQMKNSAFFNDIIKVRINHLGGIVSVGEY

SEQ ID NO: 227 - protein, 1348 aa, Finegoldia magna
MKSEKKYYIGLDVGTNSVGWAVTDEFYNILRAKGKDLWGVRLFEKAKTAADTRTFRSGRRRNDRKGVRLQILREIFEDEIKKVDKDFYDRLDESKFWAEDKKVSGKYSLFNDKNFSDKQYFEKFPTIFHLRKYLMEEHGKVDIRYYFLAINQMMKRRGHFLIDGQISHVTDDKPLKQQLILLINDLLKIELEEEFMDSIFEILADVNEKKTEKKNILKELINAQDFNKQEGKILYSIFESIVTGKAKIKNIISDEDILEKIKEDNKEDFVLTGDSYEENLQYFEEVLQENITLFNTLKSAYDFVILQSILKGKSTLSDAQVERYDEHKKDLEILKKVIKKYDEDGKLFKQVFKEDNGNGYVSYIGYYLNKNKKITAKKKISNIEFTKYVKGILEKQCDCEDEDVKYLLGKIEQENFLLKQISSINSVIPHQIHLFELDKILENLAKYYPSFNNKKEEFTKIEKIRKTFTFRIPYYVGPLNDYHKNNGGNAWIFRNKGEKIRPWNFEKIVDLHKSEEEFIKRMLNQCTYLPEETVLPKSSILYSEYMVLNELNNLRINGKPIDTDVKLKLIEELFKKKTKVTLKSIRDYMIRNNFADKEDFDNSEKNLEIVSNMKSYIDFNNILGDKFELEMVEDLIEKITIHTGNKKLLKKYIEETYPDLSSSQIQKIINLKYKDWGRLSRKLLDGITGTNIETGEIDTVINFLRNSSDNLMQIIGSQNYSFNNDIDKLRKKYIPQEISYEVVENLYVSPSVKKMIWQVIRITEEITKVMGYDPDKIFIEMAKSEEGKKTTISRKNKLLALYKAIKKDERDSQYEKLLTGLNKLDDSDLRSRKLYLYYTQMGRDMYTGEKIDLDKLFDSTHYDKDHIIPQSMKKDDSIINNLVLVNKNANQTTKGNIYPVPSSIRNNPKIYNYWKYLMEKEFISKEKYNRLIRNTPLTNEELGGFINRQLVETRQSTKAIKELFEKFYKKSKIIPVKAILASDLRKDMNTLKSREVNDLHHAHDAFLNIVAGDVWNREFTSNPINYVKENREGDKVKYSLSKYFTRPRKSKGKVIWTPEKGRKLIVDTLNKPSVLISNESHVKKGELFNATIAGKKDYKKGKIYLPLKKDDRLQDVSKYGGYKAINGAFFFLVEHTKSKKRIRSIELFPLHLLSKFYEDKNTVLDYAINVLQLQDPKIIIDKINYRTEIIIDNFSYLISTKSNDGSITVKPNEQMYWRVDEISNLKKIENKYKKDAILTEEDRKIMESYIDKIYQQFKAGKYKNRRTTDTIIEKYEIIDLDTLDNKQLYQLLVAFISLSYKTSNNAVDFTVIGLGTECGKPRITNLPDNTYLVYKSITGIYEKRIRIK

SEQ ID NO: 228 - protein, 1352 aa, Unknown
  Megasphaera sp.
MKKRNREEYYVGLDIGTSSVGWAVATPDYRIPKFRGHKMWGSRLFAEGKRAAERRQFRTNRRRLARRRDRLQILEELFAEEMAKVDNTFFMRLKESKFFLEDKTVKEKHILFSTDKFDADRFYKDNPTIYHVRKRLMEEEPQDIRELFLAVHHILKYRGHFLFAGSLEQNGASIEELVRTLLGKQGLAILDDTIDSNEMVNILKNTGETKSDRKKDVQELWNPLKDKVKKAQAAEMAGLVLGLKSDISKLFANSDYKDLDSSIKNINFSSGDYEEKRDDYANSIGDDIVLLDTMKALYDTLILSQILQGKRSISAAKVEDYNTHKEQLRALKAILKPHKRLYNEMFRENNKKDLSNYVAYISSYSEGKRVNREGFYKYVQAVLKQVDDSDSKQAILEAIRLETFLPLLRVKDNAVIPHQIHQAELEAILETARKKYNFLNDVSDGVSVKDKIIQLFTFRIPYYVGPLNPHSGETVADRKQGTGWVVRKQRGKVYPWNFADMVDVKASAEAFITNLTNKCTYLIGEDVLPKRSLLYSEFMLLNELNMIKYDGHELPVAIKQLYIEQVFKQEHKKQTKGRVLDFLKRNGLITGSATAVITGMDDAIKGDLQSYRDMVRIFGAGFDHSMAERIIRWVTLFGEAKDILENKIREVYGNSISDSQMRAIKKLKYADWGRLSQAFLIAVKGCDKSGVERNIITCLRASSQNLMEILSDQGTYIKQIKAWNHQHTTNMMDTLDYQLVDDLYVAPSVKRSIWQSLCIVEELVKIMGQAPKKIFVEVTRTKQAEKTKKDSRKKRLVELYTAIGKEGAAWKKEIEAHQAGDFRRKKLYLYYTQMGRCMYSNEPIAMDALFTSAYDIDHIYPQSLTKDGSWDNLVLVKSQLNKEKSDQYPLRPAIREKNKAHWQYLCRAGFISEKKYERLMRTTELTAEELSGFIARQLVETSQATKAVTGLLERIYTNTEICFVKAETVSQFRHQHNFIKIRELNNYHHAKDAYLNIVVGNVYHEKFTKNPWEFIARSTERRPYNLNRMYDFDLLKQGRVIWQVPKSLETVQAMMKSNDVRITKKLLVQKGELYDATITKAHKAKEGTYFPLKGADARLRDVHRYGGYEKIKIAYYSVFSCREKASNTIHTLIIPIPVYKAGLLQTEADLTAYAWQTKQKTKPIKDIYSAITPIYKKLCINTVVKIDGFKYFLGGKTGDYMWLDPAIPVVLDEQAAAYLKAISKVGRADDVENTAQAIDLITAEANEAFYDVLLKKMEAKIFAKAYQTIVEKLASETARERFRELSIGAQCSCLLEILNLLANNKTTFTFFKDKMGVTMSRRKQPMDLTKLEECIVYETSITGLYEKAVSLL

SEQ ID NO: 229 - protein, 650 aa, Haemophilus pittmaniae
MENKNLHYILGLDLGIASVGWAVVEIDKEENPLCLIDVGVRTFERAEVPKTGESLALSRRLARSARRLTQRRVARLKKAKRLLKLENILLSTDERLPHQVWQLRVEGLDRKLKRQEWAAVLLHLIKHRGYLSQRKNESKSENKELGALLSGVASNHELLQQTTYRTPAELAVKKFEVEEGHIRNQQGAYTHTFSRLDLLAEMELLFSRQQHFGNPFASEKLLENLTALLMWQKPALSGEAILKMLGKCTFEDEYKAAKNTYTAERFVWITKLNNLRIQENGLERALNDNERLILIEQPYEKAKLTYAQVRSILNLSDEAIFKGLRYSGEDKKAIETKTTLMEMKAYHQIRKVLEGNNLKAEWTELKENSTLLDEIGTAFSLYKTDEDISTYLAGKLSQPVLNALLENLSFDKFIQLSLKALYKLLPLMQQGLRYDEACHEMYGDHYGKKTYGKKTEENHYFLPQIPADEIRNPVVLRTLTQARKVINGVVRLYGSPARIHIETGREVGKSYKDRRELEKRQEENRKQRENAIKEFKEYFPHFAGEPKAKDILKMRLYKQQNAKCLYSGKPIELHRLLEKGYVEVDHALPFSRTWDDSFNNKVLVLANENQNKGNLTPFEWLDGKHNSERWRAFKALVETSAFPYAKNNAS

SEQ ID NO: 230 - protein, 1062 aa, Ralstonia syzygii
MAEKQHRWGLDIGTNSIGWAVIALIEGRPAGLVATGSRIFSDGRNPKDGSSLAVERRGPRQMRRRRDRYLRRRDRFMQALINVGLMPGDAAARKALVTENPYVLRQRGLDQALTLPEFGRALFHLNQRRGFQSNRKTDRATAKESGKVKNAIAAFRAGMGNARTVGEALARRLEDGRPVRARMVGQGKDEHYELYIAREWIAQEFDALWASQQRFHAEVLADAARDRLRAILLFQRKLLPVPVGKCFLEPNQPRVAAALPSAQRFRLMQELNHLRVMTLADKRERPLSFQERNDLLAQLVARPKCGFDMLRKIVFGANKEAYRFTIESERRKELKGCDTAAKLAKVNALGTRWQALSLDEQDRLVCLLLDGENDAVLADALREHYGLTDAQIDTLLGLSFEDGHMRLGRSALLRVLDALESGRDEQGLPLSYDKAVVAAGYPAHTADLENGERDALPYYGELLWRYTQDAPTAKNDAERKFGKIANPTVHIGLNQLRKLVNALIQRYGKPAQIVVELARNLKAGLEEKERIKKQQTANLERNERIRQKLQDAGVPDNRENRLRMRLFEELGQGNGLGTPCIYSGRQISLQRLFSNDVQVDHILPFSKTLDDSFANKVLAQHDANRYKGNRGPFEAFGANRDGYAWDDIRARAAVLPRNKRNRFAETAMQDWLHNETDFLARQLTDTAYLSRVARQYLTAICSKDDVYVSPGRLTAMLRAKWGLNRVLDGVMEEQGRPAVKNRDDHRHHAIDAVVIGATDRAMLQQVATLAARAREQDAERLIGDMPTPWPNFLEDVRAAVARCVVSHKPDHGPEGGLHNDTAYGIVAGPFEDGRYRVRHRVSLFDLKPGDLSNVRCDAPLQAELEPIFEQDDARAREVALTALAERYRQRKVWLEELMSVLPIRPRGEDGKTLPDSAPYKAYKGDSNYCYELFINERGRWDGELISTFRANQAAYRRFRNDPARFRRYTAGGRPLLMRLCINDYIAVGTAAERTIFRVVKMSENKITLAEHFEGGTLKQRDADKDDPFKYLTKSPGALRDLGARRIFVDLIGRVLDPGIKGD

SEQ ID NO: 231 - protein, 1052 aa, Haemophilus parainfluenzae
MENKNLHYILGLDLGIASVGWAVVEIDEKENPLRLIDVGVRTFERAETQKGESLALSRRSARSARRLTQRRVARLKKAKRLLKSENILLSTDERLPHQVWQLRVEGLDRKLERQEWAAVLLHLIKHRGYLSQRKNESKSENKELGALLSGVASNHELLQQATYRTPAELAVKKFEVEEGHIRNQQGAYTHTFSRLDLLAEMELLFSRQQHFGNPFASEKLLENLTALLMWQKPALSGEDILKMLGKCTFEDEYKAAKNTYTAERFVWITKLNNLRIQENGLERALSDNERLMLIEQPYEKAKLTYAQVRSILNLSDDAIFKGVRYSGEDKKAIETKTTLMEMKAYHQIRKVLEGNNLKAEWVALKANPTLLDEIGTAFSLYKTDEDISAYLAGKLSQPVLNALLENLSFDKFIQLSLKALYKLLPLMQQGLRYDEACREIYGDHYGKKTEETHHFLPQIPADEIRNPVVLRTLTQARKVINGVVRLYGSPARIHIETGREVGKSYKDRHELKKRQEENRKQREKTISEIKTLFPNFSGEPKGKDILKMRLYYQQNAKCLYSGKPLELHRLFEQKYVEVDHALPLSRTWDDSFNNKVLVLANENQNKGNLTPFEWLDGKNNSERWRTFKALVETSAFPYAKKQRILSQKLDEKGFIERNLNDTRYVARFLCNFIADNMHLTGEGKRKVFASNGQITALLRRRWGLAKSREDNDRHHALDAVLVACSTVAMQQKITRFVRFKAGDVFTGERIDRETGEIIPLHFPTPWQFFKQEVEIRIFSDNPKLELENRLPDRPQANHEFVQPLFVSRMPTRKMTGQGHMETVKSAKRLNEGISMIKMPLTKLKLKDLELMVNREREKDLYDALKTRLEAFNDDPAKAFAEPFMKKGGAIVKSVRVEQVQKSGVLVRQGNGVADNASMVRVDVFTKDGKYFLVPIYTWQVAKGILPNKAVIQGKDEEDWEDIDDATFQFSLHPNDLISVKTKKDEFLGYFNGLNRHTGGINIRTHDLEKSKGKQGIFEGIGVKIALSFEKYQIDELGKNIRLCKPSKRQPVR

SEQ ID NO: 232 - protein, 1331 aa, Lactobacillus sanfranciscensis
MNKQPYNIGLDIGTSSVGWSATELDNRLLHIKGHNGIGVRLFKEGESAADRRGFRTTRRRLARRKWRLRLLNEIFATEIAKVDPSFFARLKQSNVSPKDPNKTMFENILFDDENLDDQKFHHDYKTIYHLRQAIINHPEQKFDIRLIYLAMHHIIKYRGHFLNQANVQDFKGGKIDLEKSFKALNDIFENQGRDLRLVTDKANQYVKVLSDNAKTRSDRKKELSKLLYVPIDKDTDKNSKKVTGEILKAILGNKAKFDVIFGIEVENPKEWVLTFNSDDFDDKIEGLSSQMTDEDSEILLILKELYFALNLSDILNNSVTDKNAKTLSEAMINRYDDHKNQLAMLKKVIDSSDKKHAKELKEAYSAYIDGENNKKISFEDLKKRIQKNLVDSELSQKINDLLDHDYFLPKQRSKENGAIPHQLQQQELDQIIESQKQYYPFLAELNPNEKRSRQAKYKLDELVAFRVPYYVGPMVEVTDSNQENNGKFAWMIRKEQGEITPWNFDEKVDRTETATKFITRMTTTDTYLIGEPVLPKNSLLYQKFVVLNELNNLKINQEIITPGQKQYLYEHVMKKNKRVTLKKIADALVIKGDYPYAPEVKGTTDQKNLNNGLTTYIDLAKIFGNELDDVDREADFEKIIEWSTIFEDQHIFALKLQELKWLTEKQRNQVVKLRYQGWGKLSKELLAGLVDDNGQRIIDLLWSDNQNFMQIVNQKSFKESIADHNGAHLEEKNLKDVINDLYTSPQNKKAIRQVILVVDDIINAVGYEPANIMMEFAREDSNDHRLTNSRSRQLENVYKDITNSWFDNDSVKDELEDKIKNKDKFTDRLYLYFTQGGKDLYTGEPLNIDDLSSYDIDHILPQSFILDNSLDNRVLTSQRNNRVSKEDQLPGELFGTKMHAFWKRLKAAHLISNKKYYNLTLTPNSISKFNNQGRFINRQLVETRQVIKLAAEILHNRYSEEKGTNIVTIKANLTHHMREKFNFYKNRNVNDYHHAFDAYLTAFVGNWLLQQYPKLKPYFVYGDFAKTEINNLKSFNMLYKFEQAHQLNEKDGKIAKDADALLGYMKNVYHFKKMLVTKKLETNHGALFKQTLYPSPAHDIKKRQLIKPKDNRPTDIYGGYTHEERKYMSLVKVIGKKDNEYRMANVPLLKINKNNDIKEILKSQFSNKKFEIVLPKVLKNQLFSENGALFVIGSKGYKYNANQLVLSDLDMKLLNDLSNNKSIDEVTINQLFKNIVDSTNKYMPLYEIKNLNEVVEKFNNLEFNDKKKTITDFLLATHANPTMSNLKNIGLPSYFGRFTSGNAGIKLSENANVIYQSPTGLFSRKVKISDF

SEQ ID NO: 233 - protein, 1473 aa, Flavobacterium branchiophilum
MAKILGLDLGTNSIGWAVVERENIDFSLIDKGVRIFSEGVKSEKGIESSRAAERTGYRSARKIKYRRKLRKYETLKVLSLNRMCPLSIEEVEEWKKSGFKDYPLNPEFLKWLSTDEESNVNPYFFRDRASKHKVSLFELGRAFYHIAQRRGFLSNRLDQSAEGILEEHCPKIEAIVEDLISIDEISTNITDYFFETGILDSNEKNGYAKDLDEGDKKLVSLYKSLLAILKKNESDFENCKSEIIERLNKKDVLGKVKGKIKDISQAMLDGNYKTLGQYFYSLYSKEKIRNQYTSREEHYLSEFITICKVQGIDQINEEEKINEKKFDGLAKDLYKAIFFQRPLKSQKGLIGKCSFEKSKSRCAISHPDFEEYRMWTYLNTIKIGTQSDKKLRFLTQDEKLKLVPKFYRKNDFNFDVLAKELIEKGSSFGFYKSSKKNDFFYWFNYKPTDTVAACQVAASLKNAIGEDWKTKSFKYQTINSNKEQVSRTVDYKDLWHLLTVATSDVYLYEFAIDKLGLDEKNAKAFSKTKLKKDFASLSLSAINKILPYLKEGLLYSHAVFVANIENIVDENIWKDEKQRDYIKTQISEIIENYTLEKSRFEIINGLLKEYKSENEDGKRVYYSKEAEQSFENDLKKKLVLFYKSNEIENKEQQETIFNELLPIFIQQLKDYEFIKIQRLDQKVLIFLKGKNETGQIFCTEEKGTAEEKEKKIKNRLKKLYHPSDIEKFKKKIIKDEFGNEKIVLGSPLTPSIKNPMAMRALHQLRKVLNALILEGQIDEKTIIHIEMARELNDANKRKGIQDYQNDNKKFREDAIKEIKKLYFEDCKKEVEPTEDDILRYQLWMEQNRSEIYEEGKNISICDIIGSNPAYDIEHTIPRSRSQDNSQMNKTLCSQRFNREVKKQSMPIELNNHLEILPRIAHWKEEADNLTREIEIISRSIKAAATKEIKDKKIRRRHYLTLKRDYLQGKYDRFIWEEPKVGFKNSQIPDTGIITKYAQAYLKSYFKKVESVKGGMVAEFRKIWGIQESFIDENGMKHYKVKDRSKHTHHTIDAITIACMTKEKYDVLAHAWTLEDQQNKKEARSIIEASKPWKTFKEDLLKIEEEILVSHYTPDNVKKQAKKIVRVRGKKQFVAEVERDVNGKAVPKKAASGKTIYKLDGEGKKLPRLQQGDTIRGSLHQDSIYGAIKNPLNTDEIKYVIRKDLESIKGSDVESIVDEVVKEKIKEAIANKVLLLSSNAQQKNKLVGTVWMNEEKRIAINKVRIYANSVKNPLHIKEHSLLSKSKHVHKQKVYGQNDENYAMAIYELDGKRDFELINIFNLAKLIKQGQGFYPLHKKKEIKGKIVFVPIEKRNKRDVVLKRGQQVVFYDKEVENPKDISEIVDFKGRIYIIEGLSIQRIVRPSGKVDEYGVIMLRYFKEARKADDIKQDNFKPDGVFKLGENKPTRKMNHNQFTAFVEGIDFKVLPSGKFEKI

SEQ ID NO: 234 - protein, 933 aa, Mycoplasma iowae
SVRDYSDGPGSEKSPTPYGLWRLNKEGKVEKIGENLWDVLVGKCTIYGNDDSIKDEKTKLRGGKNSPIAEVFNFINDLTNIYLFSSSKLKLNSKTKLSILDEFNISLKTSKPIKSFSEKKLVKHIISTTEFKDINFDDVYGYRIDTSKKPLFTKLENTITIAKWLLDNNVYNELNIYDQEDLIKINNIFVILQKSMDINKRAQLVSDEYKIDLPICLELVKKIKGVMQTHSFSYKAMLEYIPVGIKYNDLETGEDTSINASTYFVDKINNLNTKLLFNGRPRKYIPKNIFEDGIISPTSKRAFIQTINVLNKIIKVYSKDYDIDNIAIELPRDKNTAEERKKISSNQKKAGEEIAEVLKFAGLNVEEYTSKLNSKTKLKLKLLKEQNYKDIYDGQEIDVIDVIKNSNKYHEEHIIPYSLCFIDSRRNKVLTKFENNKQKGNKTPFQWLSSIGKYAEFKDRVEKLFVEQKISKAKKELLLFEQDPRTEMLGFIEKNLSDTRYASKLVFDTFRDFFKVNNPNVKIKVINGALTNYARYNLFATYKDGLLERKGIMKQREFYEHHGIDATILAFLGSNHKINQLLKLSHKFKKQDDNKIYDENTGELIEFTKDFLSDEARKKAMELSKQIFEIPCKFSRPIYRKSNVSFSNETLISMKWIDDKYTKGVKINKLSLVNKDLDLNEYFADYETNEMKNLICYQEDKTLYNKLKNIYDKYNNFVENSNIKPVKNPFINYMISNFSSDDSKIQNFKHIIFYDHKGNKKFVKSLKVCGDEKNLSNIVLRKDQKDIMNSKKIKKSGILESLNPISARIYKDNKGKYITIPINSLVLNWTKKGLEIDNEKLCNILKSKNIFNNQFIEINAGQSIINNENKLFYFVGGGDFKVNKLEIKSQFCDNEIFFPRKQMNISIATIIDNYKLCEVDELGKIYNIRKIVL

SEQ ID NO: 235 - protein, 1358 aa, Acidaminococcus intestini; identical to SEQ ID NO: 99

SEQ ID NO: 236 - protein, 983 aa, Campylobacter jejuni
MARILAFDIGISSIGWAFSENDELKDCGVRIFTKAENPKTGESLALPRRLARSARKRLARRKARLNHLKHLIANEFKLNYEDYQSFDESLAKAYKGSLISPYELRFRALNELLSKQDFARVILHIAKRRGYDDIKNSDDKEKGAILKAIKQNEEKLANYQSVGEYLYKEYFQKFKENSKEFTNVRNKKESYERCIAQSFLKDELKLIFKKQREFGFSFSKKFEEEVLSVAFYKRALKDFSHLVGNCSFFTDEKRAPKNSPLAFMFVALTRIINLLNNLKNTEGILYTKDDLNALLNEVLKNGTLTYKQTKKLLGLSDDYEFKGEKGTYFIEFKKYKEFIKALGEHNLSQDDLNEIAKDITLIKDEIKLKKALAKYDLNQNQIDSLSKLEFKDHLNISFKALKLVTPLMLEGKKYDEACNELNLKVAINEDKKDFLPAFNETYYKDEVTNPVVLRAIKEYRKVLNALLKKYGKVHKINIELAREVGKNHSQRAKIEKEQNENYKAKKDAELECEKLGLKINSKNILKLRLFKEQKEFCAYSGEKIKISDLQDEKMLEIDHIYPYSRSFDDSYMNKVLVFTKQNQEKLNQTPFEAFGNDSAKWQKIEVLAKNLPTKKQKRILDKNYKDKEQKNFKDRNLNDTRYIARLVLNYTKDYLDFLPLSDDENTKLNDTQKGSKVHVEAKSGMLTSALRHTWGFSAKDRNNHLHHAIDAVIIAYANNSIVKAFSDFKKEQESNSAELYAKKISELDYKNKRKFFEPFSGFRQKVLDKIDEIFVSKPERKKPSGALHEETFRKEEFYQSYGGKEGVLKALELGKIRKVNGKIVKNGDMFRVDIFKHKKTNKFYAVPIYTMDFALKVLPNKAVARSKKGEIKDWILMDENYEFCFSLYKDSLILIQTKDMQEPEFVYYNAFTSSTVSLIVSKHDNKFETLSKNQKILFKNANEKEVIAKSIGIQNLKVFEKYIVSALGEVTKAEFRQREDFKK

SEQ ID NO: 237 - protein, 1338 aa, Streptococcus macacae
MTKPYSIGLDIGTNSVGWAVVTDGYKVPAKKMKVLGNTDKSHIKKNLLGALLFDSGNTAKDRRLKRTARRRYTRRRNRILYLQEIFAEEMAKADESFFQRLNESFLTNDDKEFDSHPIFGNKAEEEAHHHKFPTIFHLRKHLADSTEKSDLRLIYLALAHMIKFRGHFLIEGQLKAENTNVQTLFDDFVEVYDKTVEESHLSEISVSSILTEKISKSRRLENLIKYYPTEKKNTLFGNLIALSLGLQPNFKTNFKLSEDAKLQFSKDTYEEDLGELLGKIGDNYADLFISAKNLYDAILLSGILTIDDNTTKAPLSASMIKRYEEHQEDLAQLKKFIRQNLPDQYSEVFSDKTKDGYAGYIDGKTNQEAFYKYIKNMLSKTEGADYFLDKIDREDFLRKQRTFDNGSVPHQIHLQEMHAILRRQGEYYPFLKENQDKIEKILTFRIPYYVGPLARKGSRFAWAEYKADKKVTPWNFDDILDKEKSAEEFITRMTLNDLYLPEEKVLPKHSLVYETFNVYNELTKVKYVNEQGKAIFFDANMKQEIFDHVFKENRKVTKDKLLNYLNKEFEEFRIVNLTGLDKENKAFNSSLGTYHDLRKILDKSFLDDKVNEKIIEDIIQTLTLFEDREMIRQRLQKYSDIFTTQQLKKLERRHYTGWGRLSAKLINGIRDKQSNKTILGYLIDDGYSNRNFMQLINDDSLPFKEEIARAQVIGETDDLNQLVSDIAGSPAIKKGILQSLKIVDELVKVMGHNPANIVIEMARENQTTAKGRRSSQQRYKRLEEAIKNLDHDLNHKILKEHPTDNQALQNDRLFLYYLQNGRDMYTEDPLDINRLSDYDIDHIIPQSFIKDDSIDNKVLVSSAKNRGKSDNVPSEDVVNRMRPFWNKLLSCGLISQRKYSNLTKKELKPDDKAGFIKRQLVETRQITKHVAQILDARFNTKRDENKKVIRDVKIITLKSNLVSQFRKDFKFYKVREINDYHHAHDAYLNAVIGKALLDVYPQLEPEFVYGEYPHFHGYKENKATAKKFFYSNIMNFFKKDDIRTDENGEIVWKKDEHISNIKRVLSYPQVNIVKKVEIQTVGQNGGLFDDNPKSPLEVTPSKLVPLKKELNPKKYGGYQKPTTAYPVLLITDTKQLIPISVMNKKQFEQNPVKFLRDRGYQQVGKNDFIKLPKYTLVDIGDGIKRLWASSKEIHKGNQLVVSKKSQILLYHAHHLDSDLSNDYLQNHNQQFDVLFNEIISFSKKCKLGKEHIQKIENVYSNKKNSASIEELAESFIKLLGFTQLGATSPFNFLGVKLNQKQYKGKKDYILPCTEGTLIRQSITGLYETRVDLSKIGED

SEQ ID NO: 238 - protein, 1265 aa, Mycoplasma ovipneumoniae
MHNKKNITIGFDLGIASIGWAIIDSTTSKILDWGTRTFEERKTANERRAFRSTRRNIRRKAYRNQRFINLILKYKDLFELKNISDIQRANKKDTENYEKIISFFTEIYKKCAAKHSNILEVKVKALDSKIEKLDLIWILHDYLENRGFFYDLEEENVADKYEGIEHPSILLYDFFKKNGFFKSNSSIPKDLGGYSFSNLQWVNEIKKLFEVQEINPEFSEKFLNLFTSVRDYAKGPGSEHSASEYGIFQKDEKGKVFKKYDNIWDKTIGKCSFFVEENRSPVNYPSYEIFNLLNQLINLSTDLKTTNKKIWQLSSNDRNELLDELLKVKEKAKIISISLKKNEIKKIILKDFGFEKSDIDDQDTIEGRKIIKEEPTTKLEVTKHLLATIYSHSSDSNWININNILEFLPYLDAICIILDREKSRGQDEVLKKLTEKNIFEVLKIDREKQLDFVKSIFSNTKFNFKKIGNFSLKAIREFLPKMFEQNKNSEYLKWKDEEIRRKWEEQKSKLGKTDKKTKYLNPRIFQDEIISPGTKNTFEQAVLVLNQIIKKYSKENIIDAIIIESPREKNDKKTIEEIKKRNKKGKGKTLEKLFQILNLENKGYKLSDLETKPAKLLDRLRFYHQQDGIDLYTLDKINIDQLINGSQKYEIEHIIPYSMSYDNSQANKILTEKAENLKKGKLIASEYIKRNGDEFYNKYYEKAKELFINKYKKNKKLDSYVDLDEDSAKNRFRFLTLQDYDEFQVEFLARNLNDTRYSTKLFYHALVEHFENNEFFTYIDENSSKHKVKISTIKGHVTKYFRAKPVQKNNGPNENLNNNKPEKIEKNRENNEHHAVDAAIVAIIGNKNPQIANLLTLADNKTDKKFLLHDENYKENIETGELVKIPKFEVDKLAKVEDLKKIIQEKYEEAKKHTAIKFSRKTRTILNGGLSDETLYGFKYDEKEDKYFKIIKKKLVTSKNEELKKYFENPFGKKADGKSEYTVLMAQSHLSEFNKLKEIFEKYNGFSNKTGNAFVEYMNDLALKEPTLKAEIESAKSVEKLLYYNFKPSDQFTYHDNINNKSFKRFYKNIRIIEYKSIPIKFKILSKHDGGKSFKDTLFSLYSLVYKVYENGKESYKSIPVTSQMRNFGIDEFDFLDENLYNKEKLDIYKSDFAKPIPVNCKPVFVLKKGSILKKKSLDIDDFKETKETEEGNYYFISTISKRFNRDTAYGLKPLKLSVVKPVAEPSTNPIFKEYIPIHLDELGNEYPVKIKEHTDDEKLMCTIK

SEQ ID NO: 239 - protein, 1535 aa, Flavobacterium columnare
MTKILGLDLGTNSIGWAIRDTENEGINQILDKGARIFSEGVKSENGKEISRAAERTAYRSARKIKYRRKLRKYETLKVLSINGMCPLSVEEVEQWKKSGFKEYPLNPEFLDWLRTNEDKNINPYLFRDKASKQKVTLFELGRALYHIAQRRGFLSNRLDQSAEGVFEEHNPQIQNLIEDLDSSNTILNELKEYYINLGIIDETEKSGFKKDLDEGEKKLKSLYNSLVAITKKNANDIETCKQELIARLNKKEDLGKVKGKIKDISQAMLDRNFKTLGQYFFSLYNKERIRNQYTSREEHYLEEFIIICQTQGIEGINTNEKLPEKKFTGLAKDLYRAIFFQRPLKSQKGLIGKCSFEKNKSRCAVSHPDYEEFRMWSYLNTIKIGTQSEKTLRFLTLEEKLKLVPKFYRKSDFNFEVLAKELVEKGASFGYYKSSKKNEFFYWFNYKPTDSVSACVVSASLENAIGKDWKIKTFEYQTRNTEKNEVTKSVDYKDLWHLLSVATSDTYLYDFAIEKLKLEPKNAKAFSKTKLKKDFASLSLAAIAKILPYLKQGLLYSHAVFMANIENIVDADIWKDEEQQKFIQSKIVELVDNYIVEKSKLELINGLLKIYNTEDKEGRKVYYSKEAESLFEADLRKKLVPFYKANIIIEEHEQEIIFQDLFPILMDQLKKQEFIKIGRLDKQIEAFLEGENEEGQIFCNHTDKLKKLYHPSDIEVFKKKTIKDEWGNEKVVLGSPLTTSIKNPMAMRALHQLRKVLNTLIANDQIDEDTRIHIEMARELNDANKRKGIQDFQNENKKFREEAIKEIKKLYLEECHKDVNPTEDDILRYQLWLEQGKCEIYEEGNNISICDIIGSNPSYDIEHTIPRSISQDNSQMNKTLCSLKFNRSIKKQKMPVELSNYNDILPRIAHWKKEAEELTRQIETISRSIKSAATKVAKDKNIRKRHYLTLKRDYILGKYERFTWEEPKVGFKNSQIPDTGIITKYAQAYLKSYFKRVESVKGGAVAEFRKLWGIQESFIDENWWKHYKDKDRDKHTHHTIDAITIACMPKDKYDLLAHAWRLEDEQDKKAAKVLIEQAKPWKTFKEDIEKIETEILVSHFTPDNVKKQSKSIIKNRGKKVYVLKNELPVNFKNKIEGKDYFKLKFDSKILYKIPKKKEKQTDTFYEELPKNYLNGVEGKDYFKINTTGKTFYKIPIFNQGDTIRGSLHQETTYGAIKLPDIDIETKKPLHTDKGGFILKKDIKGNEIVFFVVRKEISKISENDVQNIVDNVVRKKIENAIANSLITFKIVKKKKVAVIKEGVTIWMREPNIEKGIEGIPIKKVRIITNSVKNPIEIKVHSPLSKSRHKHKQKVYGQNDENYAMALYELDGKREFELINNFNLAKLLKQSQSYYPLHKEKEIKGKKILVPIEKRNNKDVILKRGQQVVFYDKTVENPKDISEIIDFRERIYIIEGLTIQRQKDKKTSKVNEYGIIQLRHFKEARKSEEISKDNFKPDGEFKINENKPTRKMNHNQFTAFVEGIDFKVLPSGKFQKI

SEQ ID NO: 240 - protein, 1459 aa, Flavobacterium columnare
MKFNLGLDIGTNSIGWALVNEDYENKKGKIIAAGSRIIPMTQDILDKFGSGAITETQTALRTDYRSKRKLIQRFLLRRERLHRVLNVLDFLPKHYAESIDFEKYFGKFLPNTEPKLAYNQNQFIFQNSFLEMLKEFQEKHPELLTNNKKIPYDWTIYYLRKKALNQRIEKEELAWLLLQFNQKRGYNQLRDEEEESVPNKQVEFYSLKIIDVVADQPKEGRDKRWYSINLENGWTYRRESKTPLFNWEGKTKDFIVTTDLNQDGSIKKDKEGKEKRSFRAPSEGDWTLLKKKTEKEIYESGKTLGTYIYDALLNTPDLKIKGDFIRTIDRSIYKEELQQIINKQKEYHLELNSSKLYKACLEELYPKNEIYKSALKNKDIAYLFINDILYYQRPLKAPKYNIGKCTYESRTFKKEDKKIREYIPAVAKSHPLFQEFRLWQWIKNLKIYEKLSSDNCTDFFLTNEQDFENLFEFLWNKKEIDHKGILEYLVKTKFPDLKPKQVKTKVKEYRWNYVYDHEKDESKTYPCGETYFLLKNKLDKIYNAQDDFLDKERLYNLWHIIYSVTDKKQYEKALAKFALKNHLDTKSFVNTFKRIPPFKNDYAIYSLKAIKKLLPLMRVGKYWNYDDIDPITKQKIQCIITGEENDTISTLVREKTNHFSNENDFKNLPLWLAGYIVYNSHNESSEIEKWKSPQDIDTFLKKFKQHALRNPIVEQVVTETLRVVRDIWSKKGQGKKDFFNEIHIELGKDLKNPVDKRRKLSSTNTKNESTNTRIKALLIELFTQGVENVKPNSPKHQEILKIFEEGALNSGIEIEEDIIKISNTDQPTKKQLELYILWLEHKYKSPYTGQSIPLSKLFTPNYEIEHIIPRSKYYDDNLSNKVICETEINRLKNNQLGYEFINNHEIREVTLEEGKTIRLLSPEQYWNFVTTYYAKNKAKRENLLLKELPVQMVEKQLNDTRYVSKYVMQLLSKIVRKEDGTDNGINSTNILSISGKMTRALKNDWDLNDVWNDLLLYRFERLNTITKTNLFTTYSEQKQKRMPIVPDQYAKGFHKKRLDHRHHALDAIVIACITRNHINYMNNQNIQGEKLKKNAIEKENYREILQKSRLDIRAQLCEKKYNDNDPTKYNWVFIKPWADFTENTKDILESIIPSFKQNLRIINKTVNYYEKYNENGKKVKVRQIKGDNWAIRKPLHKETISGKVHLSYKTPAKGKILTATRKVLDSSMDFKSIEKITDTGIQKILKNYLEYKKSPELAFSPEGIEELNATITKYNNGFHHKPIYKVRIYEEGVKFPLGNKGNKKSKYVEAEKGTNLFFAIYKDQENNRYFETIPFNDVLETLKKGMSAVPEKNQEENTLVFALSPQDLVFVPTLDEIENPDIVDFKNLTKDQTNRIYKMVSSSGKQCFFIKAEVATSIVNKMEFSTSNKMENSIEGIQIKSNCWKLKLDRLGTITRVIK

SEQ ID NO: 241 - protein, 1389 aa, Oenococcus kitaharae
MARDYSVGLDIGTSSVGWAAIDNKYHLIRAKSKNLIGVRLFDSAVTAEKRRGYRTTRRRLSRRHWRLRLLNDIFAGPLTDFGDENFLARLKYSWVHPQDQSNQAHFAAGLLFDSKEQDKDFYRKYPTIYHLRLALMNDDQKHDLREVYLAIHHLVKYRGHFLIEGDVKADSAFDVHTFADAIQRYAESNNSDENLLGKIDEKKLSAALTDKHGSKSQRAETAETAFDILDLQSKKQIQAILKSVVGNQANLMAIFGLDSSAISKDEQKNYKFSFDDADIDEKIADSEALLSDTEFEFLCDLKAAFDGLTLKMLLGDDKTVSAAMVRRFNEHQKDWEYIKSHIRNAKNAGNGLYEKSKKFDGINAAYLALQSDNEDDRKKAKKIFQDEISSADIPDDVKADFLKKIDDDQFLPIQRTKNNGTIPHQLHRNELEQIIEKQGIYYPFLKDTYQENSHELNKITALINFRVPYYVGPLVEEEQKIADDGKNIPDPTNHWMVRKSNDTITPWNLSQVVDLDKSGRRFIERLTGTDTYLIGEPTLPKNSLLYQKFDVLQELNNIRVSGRRLDIRAKQDAFEHLFKVQKTVSATNLKDFLVQAGYISEDTQIEGLADVNGKNFNNALTTYNYLVSVLGREFVENPSNEELLEEITELQTVFEDKKVLRRQLDQLDGLSDHNREKLSRKHYTGWGRISKKLLTTKIVQNADKIDNQTFDVPRMNQSIIDTLYNTKMNLMEIINNAEDDFGVRAWIDKQNTTDGDEQDVYSLIDELAGPKEIKRGIVQSFRILDDITKAVGYAPKRVYLEFARKTQESHLTNSRKNQLSTLLKNAGLSELVTQVSQYDAAALQNDRLYLYFLQQGKDMYSGEKLNLDNLSNYDIDHIIPQAYTKDNSLDNRVLVSNITNRRKSDSSNYLPALIDKMRPFWSVLSKQGLLSKHKFANLTRTRDFDDMEKERFIARSLVETRQIIKNVASLIDSHFGGETKAVAIRSSLTADMRRYVDIPKNRDINDYHHAFDALLFSTVGQYTENSGLMKKGQLSDSAGNQYNRYIKEWIHAARLNAQSQRVNPFGFVVGSMRNAAPGKLNPETGEITPEENADWSIADLDYLHKVMNFRKITVTRRLKDQKGQLYDESRYPSVLHDAKSKASINFDKHKPVDLYGGFSSAKPAYAALIKFKNKFRLVNVLRQWTYSDKNSEDYILEQIRGKYPKAEMVLSHIPYGQLVKKDGALVTISSATELHNFEQLWLPLADYKLINTLLKTKEDNLVDILHNRLDLPEMTIESAFYKAFDSILSFAFNRYALHQNALVKLQAHRDDFNALNYEDKQQTLERILDALHASPASSDLKKINLSSGFGRLFSPSHFTLADTDEFIFQSVTGLFSTQKTVAQLYQETK

SEQ ID NO: 242 - protein, 1425 aa, Prevotella micans
MIQKIFGLDLGTNSIGSSVRNLELGENLTEQLEFFSSDIFGSSVSKNSNGREYSLAGNRSAHRRSRGLNEARRRKLWATLDLLIEHGLCPMSPDSLMQWRTYDKQKGLYRQYPIEDKDFNAWIMLDFNGDGKPDYSSPYQLRRELVVRQFDFDQPIERYKLGRALYHIAQHRGFKSSKGETIADQEKNEKKPIAEEGADIANEMKASETKLSKGLVAYMQENHLKTVGEAFAKLEDERVRIRNNESYRAIRSQYQDEIKEIFTYQKKLSVESELYERLTSEKKGVGTIFYKRPLRSQRGNVGKCTLERNKPRCPIGRPEFEEFRAWTLINNIKIRETAGEPYKQLPIKLRQELLKDCFLSKVKADFKFEDIRKYIEKRLGLSFSNDDKTINYKDSVSIAACPVTVRMKKLLGENWANCRIDGEKRRQAHGKNNNNEHIVSYTEEDIWHVCYNAEDPEEVSNFARKALHWDENKIKELVRLWTSIPQGYAMLSLKAIRNINRMLLLGLKYSDAVLLAKLPDIVPVSDEDILAITKEFLQLEDKLNQEKQINNIVNSLIANYKSKLEENRFADHNYQYQLGEGDDEDINTQIKSHIGAKLWVQIGADEQTKIFQAVRSKYQDFFKSYKRKFVESPKLGELLVAFLTEKFPNVKSKQWERLYHPSQIAIYRPIPVDNDRSKLRLGNPNIGAIKNPTVMRVLNTLRRRVNQLLDDGVISPDETRVVVETARELNDANTKWALDRYNRIRRDENEKIRKILKELNPTTNSISEQDIDKARYIFEQCETDFYTDGKVPYYNKDIKKYKLWLEQGGQCLYTGQTINLTNLFNPNAFDMEHTIPKSISFDNSDQNLTLCESYYNRFIKKNNIPTDMPNYDKDVTINGKEYTAIKPRLQRWKERVDRLSRNVDFWKGQARRAQDKDRKDECIREKHLWDMELAYWKGKLERFTMTDVTDGFKNSQLVDTRVITRHAVLYLKSIFNHVEVQRGETTAEFRKILGLQSIDEKKDRSLHSHHAIDATMLTVIPSAAKRDRMLELFYKIEETKKALKNYNDNNKTGLNLELKGLEEKLDKEKKDCRVGRRVNDLDRFINENIIVSHHTKDQALTPAHRRLRKRGKIVGGKEHPRWQTGDSLRGEIHKASYYGAITQFAKDANGKVLMKDGQAQIDPTIYYVIRRELKYKRSTQDSGFTNWEDLEKVIVDTDLFGLMKGQFPEGTSFKDACEQGFYMIKKGKNGEGDVKTHRIRHVRCKAVKTALRIKEQTYKSSKDYKQFFYAAVGDLYVMCYYTDGKKRDFKIYSLYDISNHRKSGTEDIPKFITDKKGNHLPLDYKLRTGDMVLLYKDNPEELKDLDQVNLKRRLYKVNRFESEGLIILLTHHLSTTTERGCSIGKIENYQNLPTAIRCGIKTIKFLIMGKHRDFVIRNGNIEFKH

SEQ ID NO: 243 - protein, 1473 aa, Mucilaginibacter paludis
MKNILGLDLGTNSIGWALIEKDTDQKNGNILGTGSRIIPMSQDIKDEFGKGNSISQTADRTKFRSVRRLRERHLLRRERLHRVLNVLGFLPKHYADQIDFKKRLGKLVNETEPKLVYDNKNFIFKKSFEAMLSDFNQHQPLLLADGKKVPFDWTIYYLRKKALTEKIEKEELAWLILNFNQKRGYYQLRGEEEEENPNKMVAFHSLKIVEVIADESQKGKAETWYSLILENGWIYRRSSKTPLYDWKGKQRDFIVTTDLNDDGSIKTDKEGLEKRSFRAPVEDDWTLVKKKTEQEINRSHKTVGTYIYENLLQDPKQKIKGKLVRTIEREFYKDELKMILKNQQKFHPELNDEHLYINCVRELYRNNQAHQTILSKKDFVHLFIDDIIFYQRPLRSQKSSISNCTLEFRKYKNENGTDQTDYLKAIPKSHPLFQEFRLWQWIYNLGIYQKEDDTNVTDELIKNIDGYQDLFDFLNNKKEIRQDILIKFLVEQTGLKGKPLSSVVAKYRWNFVEDKIYPCNETGTQIRTRLAKVENTPEDFLTAETEIKLWHIIYSVNDKADYEKALKTFAEKHNLDTHSFVENFKKFPPFKSEYGSFSEKAIKKLLPLIRLGKYWSWENIDKKTQERIEKILTGEFDEAIKSRVRDKAIHLTEEDHFQGLQLWLASYVVYGRHSEADNLDKWHTVADLEDYLAEFRQHSLRNPIVEQVITETLRVVKDIWLQYGQGAKDFFSEIHIELAREMKNTGDERKRLTSLVTDNENTNLRIKVLLSELLNDGNVENVRPYSPMQQEALKIFEDGVLNSDIEIEDDILKISKMAQPTNTELKRYKLWLEQKYRSPYTGQIIPLNRLFTADYEIEHIIPQSRFFDDSFSNKIICESAVNQLKDKQLGLEFIKNHSGTIVKLGMGKTAKILDVESYNEFVKGNYTKNISKRNKLMLEEIPDKMIERQLNDTRYISKFIISALSNIVRSESNDDGFNSKNVLPGNGKITSRLKQDWGMNDIWNELILPRFERMNKITDSAVFTAWNENNQKFLPIVPLEFSKGFQKKRIDHRHHALDALVIAASTREHINLLNNEHAKSDKRFDLNRKLRKFEKVAYNDPKTGKRIEKEVPTIFLKPWETFTVDAKNSLESIIVSFKQNLRVINRATNYSESYNDENGALRLGKDGNPLKEKIKQSKGDSWAIRKPMHKDFVYGKVHLQNVKLPKDKFITAIRKSLDVTFDLKRIETITDTGIQKILKNYLHSKENKVELAFSPEGIEDMNQHIERYNDGKKHQPIHKVRVFEIGSRFSLGESGNKKTKFVEAAKGTNLFFAVYQDDNKGKRNYETIPLNIVIERQKLGLHSVPTEDAKGGKLLFHLSPNDMVYVPTSEELEDNLASVNIKRLNTAQRKRIYKVEKASGVECYFIRQDIAYLIKNYDAKTKIGELESQNKLQTTMTDDRLKITDVCVKLNIDRLGSIAETFLGNQYGASKKT

SEQ ID NO: 244 - protein, 1365 aa, Filifactor alocis
MTKEYYLGLDVGTNSVGWAVTDSQYNLCKFKKKDMWGIRLFESANTAKDRRLQRGNRRRLERKKQRIDLLQEIFSPEICKIDPTFFIRLNESRLHLEDKSNDFKYPLFIEKDYSDIEYYKEFPTIFHLRKHLIESEEKQDIRLIYLALHNIIKTRGHFLIDGDLQSAKQLRPILDTFLLSLQEEQNLSVSLSENQKDEYEEILKNRSIAKSEKVKKLKNLFEISDELEKEEKKAQSAVIENFCKFIVGNKGDVCKFLRVSKEELEIDSFSFSEGKYEDDIVKNLEEKVPEKVYLFEQMKAMYDWNILVDILETEEYISFAKVKQYEKHKTNLRLLRDIILKYCTKDEYNRMFNDEKEAGSYTAYVGKLKKNNKKYWIEKKRNPEEFYKSLGKLLDKIEPLKEDLEVLTMMIEECKNHTLLPIQKNKDNGVIPHQVHEVELKKILENAKKYYSFLTETDKDGYSVVQKIESIFRFRIPYYVGPLSTRHQEKGSNVWMVRKPGREDRIYPWNMEEIIDFEKSNENFITRMTNKCTYLIGEDVLPKHSLLYSKYMVLNELNNVKVRGKKLPTSLKQKVFEDLFENKSKVTGKNLLEYLQIQDKDIQIDDLSGFDKDFKTSLKSYLDFKKQIFGEEIEKESIQNMIEDIIKWITIYGNDKEMLKRVIRANYSNQLTEEQMKKITGFQYSGWGNFSKMFLKGISGSDVSTGETFDIITAMWETDNNLMQILSKKFTFMDNVEDFNSGKVGKIDKITYDSTVKEMFLSPENKRAVWQTIQVAEEIKKVMGCEPKKIFIEMARGGEKVKKRTKSRKAQLLELYAACEEDCRELIKEIEDRDERDFNSMKLFLYYTQFGKCMYSGDDIDINELIRGNSKWDRDHIYPQSKIKDDSIDNLVLVNKTYNAKKSNELLSEDIQKKMHSFWLSLLNKKLITKSKYDRLTRKGDFTDEELSGFIARQLVETRQSTKAIADIFKQIYSSEVVYVKSSLVSDFRKKPLNYLKSRRVNDYHHAKDAYLNIVVGNVYNKKFTSNPIQWMKKNRDTNYSLNKVFEHDVVINGEVIWEKCTYHEDTNTYDGGTLDRIRKIVERDNILYTEYAYCEKGELFNATIQNKNGNSTVSLKKGLDVKKYGGYFSANTSYFSLIEFEDKKGDRARHIIGVPIYIANMLEHSPSAFLEYCEQKGYQNVRILVEKIKKNSLLIINGYPLRIRGENEVDTSFKRAIQLKLDQKNYELVRNIEKFLEKYVEKKGNYPIDENRDHITHEKMNQLYEVLLSKMKKFNKKGMADPSDRIEKSKPKFIKLEDLIDKINVINKMLNLLRCDNDTKADLSLIELPKNAGSFVVKKNTIGKSKIILVNQSVTGLYENRREL

SEQ ID NO: 245 - protein, 1130 aa, Streptococcus macedonicus
MTNGKILGLDIGIASVGVGIIEAKTGKVVHANSRLFSAANAENNAERRGFRGSRRLNRRKKHRVKRVRDLFEKYGIVTDFRNLNLNPYELRVKGLTEQLTNEELFAALRTISKRRGISYLDDAEDDSTGSTDYAKSIDENRRLLKTKTPGQIQLERLEKYGQLRGNFTVYDENGEAHRLINVFSTSDYEKEARKILETQADYNKKITAEFIDDYVEILTQKRKYYHGPGNEKSRTDYGRFRTDGTTLENIFGILIGKCNFYPDEYRASKASYTAQEYNFLNDLNNLKVPTETGKLSTEQKESLVEFAKNTAILGPAKLLKEIAKILDCKVDEIKGYREDDKGKPDLHTFEPYRKLKFNLDSVNIDYLSREVLDKLADILTLNTEREGIEDAIKRNLPNQFTEEQISEIINVRKSQSTAFNKGWHSFSAKLMNELIPELYATSDEQMTILTRLEKFKVKKKSSKNIKTIDEKEITDEIYNPVVAKSVRQTIKIINAAVKKYGDFDKIVIEMPRDKNADDEKKFINKRNKENKKEKDDALKRAAYLYNGTDKLPDEVFHGNKQLETKIRLWYQQGERCLYSGKPIPIQELVHNSNNFEIDHILPLSLSFDDSLANKVLVYSWTNQEKGQKTPYQVIDSMDAAWSFREMKEYVLKQKGLGKKKRDYLLTTENIDKIEVKKKFIERNLVDTRYASRVVLNSLQSALRELGKDTKVSVVRGQFTSQLRRKWKIDKSRETYHHHAVDALIIAASSQLKLWEKQDNPMFVDYGNNQVVDKQTGEILSVSDNEYKELVFQPPYQGFVNTISSKGFEDEILFSYQVDSKYNRKVSDATIYSTRKAKIGKDKKEETYVLGKIKDIYSQNGFDTFVKKYNKDKTQFLMYQKDPLTWENVIEVILGDYPTTKKSEDGKNDVKCNPFEEYRRENGLICKYSKKGKGTPIKSLKYYDKKLGNCIDITPEESRNKVILQSINPWRADVYFNPETLKYELMGLKYSDLSFEKGTGNYHISQEKYDAIKEKEGIGKKSEFKFTLYRNDLILIKDIASGEQEIYRFLSRTMPNVNHYVELKPYDKEKFDNVQELVEALGEADKVGRCIKSLNKPNISIYKVRTDVLGNKYFVKKEGDKPKLDFKNNKK

SEQ ID NO: 246 - protein, 1367 aa, Streptococcus pyogenes
MDKKYSIGLDIGTNSVGWAVITDDYKVPSKKFKVLGNTDRHSIKKNLIGALLFGSGETAEATRLKRTARRRYTRRKNRICYLQEIFSNEMAKVDDSFFHRLEESFLVEEDKKHERHPIFGNIVDEVAYHEKYPTIYHLRKKLADSTDKADLRLIYLALAHMIKFRGHFLIEGDLNPDNSDVDKLFIQLVQIYNQLFEENPINASRVDAKAILSARLSKSRRLENLIAQLPGEKRNGLFGNLIALSLGLTPNFKSNFDLAEDAKLQLSKDTYDDDLDNLLAQIGDQYADLFLAAKNLSDAILLSDILRVNSEITKAPLSASMIKRYDEHHQDLTLLKALVRQQLPEKYKEIFFDQSKNGYAGYIDGGASQEEFYKFIKPILEKMDGTEELLVKLNREDLLRKQRTFDNGSIPHQIHLGELHAILRRQEDFYPFLKDNREKIEKILTFRIPYYVGPLARGNSRFAWMTRKSEETITPWNFEEVVDKGASAQSFIERMTNFDKNLPNEKVLPKHSLLYEYFTVYNELTKVKYVTEGMRKPAFLSGEQKKAIVDLLFKTNRKVTVKQLKEDYFKKIECFDSVEISGVEDRFNASLGAYHDLLKIIKDKDFLDNEENEDILEDIVLTLTLFEDRGMIEERLKTYAHLFDDKVMKQLKRRRYTGWGRLSRKLINGIRDKQSGKTILDFLKSDGFANRNFMQLIHDDSLTFKEDIQKAQVSGQGHSLHEQIANLAGSPAIKKGILQTVKIVDELVKVMGHKPENIVIEMARENQTTQKGQKNSRERMKRIEEGIKELGSQILKEHPVENTQLQNEKLYLYYLQNGRDMYVDQELDINRLSDYDVDHIVPQSFIKDDSIDNKVLTRSDKNRGKSDNVPSEEVVKKMKNYWRQLLNAKLITQRKFDNLTKAERGGLSELDKAGFIKRQLVETRQITKHVAQILDSRMNTKYDENDKLIREVKVITLKSKLVSDFRKDFQFYKVREINNYHHAHDAYLNAVVGTALIKKYPKLESEFVYGDYKVYDVRKMIAKSEQEIGKATAKYFFYSNIMNFFKTEITLANGEIRKRPLIETNGETGEIVWDKGRDFATVRKVLSMPQVNIVKKTEVQTGGFSKESILPKRNSDKLIARKKDWDPKKYGGFDSPTVAYSVLVVAKVEKGKSKKLKSVKELLGITIMERSSFEKNPIDFLEAKGYKEVKKDLIIKLPKYSLFELENGRKRMLASAGELQKGNELALPSKYVNFLYLASHYEKLKGSPEDNEQKQLFVEQHKHYLDEIIEQISEFSKRVILADANLDKVLSAYNKHRDKPIREQAENIIHLFTLTNLGAPAAFKYFDTTIDRKRYTSTKEVLDATLIHQSITGLYETRIDLSQLGGD

SEQ ID NO: 247 - protein, 1233 aa, Mycoplasma canis
MEKKRKVTLGFDLGIASVGWAIVDSETNQVYKLGSRLFDAPDTNLERRTQRGTRRLLRRRKYRNQKFYNLVKRTEVFGLSSREAIENRFRELSIKYPNIIELKTKALSQEVCPDEIAWILHDYLKNRGYFYDEKETKEDFDQQTVESMPSYKLNEFYKKYGYFKGALSQPTESEMKDNKDLKEAFFFDFSNKEWLKEINYFFNVQKNILSETFIEEFKKIFSFTRDISKGPGSDNMPSPYGIFGEFGDNGQGGRYEHIWDKNIGKCSIFTNEQRAPKYLPSALIFNFLNELANIRLYSTDKKNIQPLWKLSSVDKLNILLNLFNLPISEKKKKLTSTNINDIVKKESIKSIMISVEDIDMIKDEWAGKEPNVYGVGLSGLNIEESAKENKFKFQDLKILNVLINLLDNVGIKFEFKDRNDIIKNLELLDNLYLFLIYQKESNNKDSSIDLFIAKNESLNIENLKLKLKEFLLGAGNEFENHNSKTHSLSKKAIDEILPKLLDNNEGWNLEAIKNYDEEIKSQIEDNSSLMAKQDKKYLNDNFLKDAILPPNVKVTFQQAILIFNKIIQKFSKDFEIDKVVIELAREMTQDQENDALKGIAKAQKSKKSLVEERLEANNIDKSVFNDKYEKLIYKIFLWISQDFKDPYTGAQISVNEIVNNKVEIDHIIPYSLCFDDSSANKVLVHKQSNQEKSNSLPYEYIKQGHSGWNWDEFTKYVKRVFVNNVDSILSKKERLKKSENLLTASYDGYDKLGFLARNLNDTRYATILFRDQLNNYAEHHLIDNKKMFKVIAMNGAVTSFIRKNMSYDNKLRLKDRSDFSHHAYDAAIIALFSNKTKTLYNLIDPSLNGIISKRSEGYWVIEDRYTGEIKELKKEDWTSIKNNVQARKIAKEIEEYLIDLDDEVFFSRKTKRKTNRQLYNETIYGIATKTDEDGITNYYKKEKFSILDDKDIYLRLLREREKFVINQSNPEVIDQIIEIIESYGKENNIPSRDEAINIKYTKNKINYNLYLKQYMRSLTKSLDQFSEEFINQMIANKTFVLYNPTKNTTRKIKFLRLVNDVKINDIRKNQVINKFNGKNNEPKAFYENINSLGAIVFKNSANNFKTLSINTQIAIFGDKNWDIEDFKTYNMEKIEKYKEIYGIDKTYNFHSFIFPGTILLDKQNKEFYYISSIQTVRDIIEIKFLNKIEFKDENKNQDTSKTPKRLMFGIKSIMNNYEQVDISPFGINKKIFE

SEQ ID NO: 248 - protein, 1375 aa, Lactobacillus johnsonii
MTKIKDDYIVGLDIGTDSCGWVAMNSNNDILKLQGKTAIGSRLFEGGKSAAERRLFRTTHRRIKRRRWRLKLLEEFFDPYMAEVDPYFFARLKESGLSPLDKRKTVSSIVFPTSAEDKKFYDDYPTIYHLRYKLMTEDEKFDLREVYLAIHHIIKYRGNFLYNTSVKDFKASKIDVKSSIEKLNELYENLGLDLNVEFNISNTAEIEKVLKDKQIFKRDKVKKIAELFAIKTDNKEQSKRIKDISKQVANAVLGYKTRFDTIALKEISKDELSDWNFKLSDIDADSKFEALMGNLDENEQAILLTIKELFNEVTLNGIVEDGNTLSESMINKYNDHRDDLKLLKEVIENHIDRKKAKELALAYDLYVNNRHGQLLQAKKKLGKIKPRSKEDFYKVVNKNLDDSRASKEIKKKIELDSFMPKQRTNANGVIPYQLQQLELDKIIENQSKYYPFLKEINPVSSHLKEAPYKLDELIRFRVPYYVGPLISPNESTKDIQTKKNQNFAWMIRKEEGRITPWNFDQKVDRIESANKFIKRMTTKDTYLFGEDVLPANSLLYQKFTVLNELNNIRINGKRISVDLKQEIYENLFKKHTTVTVKKLENYLKENHNLVKVEIKGLADEKKFNSGLTTYNRFKNLNIFDNQIDDLKYRNDFEKIIEWSTIFEDKSIYKEKLRSIDWLNEKQINALSNIRLQGWGRLSKKLLAQLHDHNGQTIIEQLWDSQNNFMQIVTQADFKDAIAKANQNLLVATSVEDILNNAYTSPANKKAIRQVIKVVDDIVKAASGKVPKQIAIEFTRDADENPKRSQTRGSKLQKVYKDLSTELASKTIAEELNEAIKDKKLVQDKYYLYFMQLGRDAYTGEPINIDEIQKYDIDHILPQSFIKDDALDNRVLVSRAVNNGKSDNVPVKLFGNEMAANLGMTIRKMWEEWKNIGLISKTKYNNLLTDPDHINKYKSAGFIRRQLVETSQIIKLVSTILQSRYPNTEIITVKAKYNHYLREKFDLYKSREVNDYHHAIDAYLSAICGNLLYQNYPNLRPFFVYGQYKKFSSDPDKEKAIFNKTRKFSFISQLLKNKSENSKEIAKKLKRAYQFKYMLVSRETETRDQEMFKMTVYPRFSHDTVKAPRNLIPKKMGMSPDIYGGYTNNSDAYMVIVRIDKKKGTEYKILGIPTRELVNLKKAEKEDHYKSYLKEILTPRILYNKNGKRDKKITSFEIVKSKIPYKQVIQDGDKKFMLGSSTYVYNAKQLTLSTESMKAITNNFDKDSDENDALIKAYDEILDKVDKYLPLFDINKFREKLHSGREKFIKLSLEDKKDTILKVLEGLHDNAVMTKIPTIGLSTPLGFMQFPNGVILSENAKLIYQSPTGLFKKSVKISDL

SEQ ID NO: 249 - protein, 1053 aa, Staphylococcus aureus
MKRNYILGLDIGITSVGYGIIDYETRDVIDAGVRLFKEANVENNEGRRSKRGARRLKRRRRHRIQRVKKLLFDYNLLTDHSELSGINPYEARVKGLSQKLSEEEFSAALLHLAKRRGVHNVNEVEEDTGNELSTKEQISRNSKALEEKYVAELQLERLKKDGEVRGSINRFKTSDYVKEAKQLLKVQKAYHQLDQSFIDTYIDLLETRRTYYEGPGEGSPFGWKDIKEWYEMLMGHCTYFPEELRSVKYAYNADLYNALNDLNNLVITRDENEKLEYYEKFQIIENVFKQKKKPTLKQIAKEILVNEEDIKGYRVTSTGKPEFTNLKVYHDIKDITARKEIIENAELLDQIAKILTIYQSSEDIQEELTNLNSELTQEEIEQISNLKGYTGTHNLSLKAINLILDELWHTNDNQIAIFNRLKLVPKKVDLSQQKEIPTTLVDDFILSPVVKRSFIQSIKVINAIIKKYGLPNDIIIELAREKNSKDAQKMINEMQKRNRQTNERIEEIIRTTGKENAKYLIEKIKLHDMQEGKCLYSLEAIPLEDLLNNPFNYEVDHIIPRSVSFDNSFNNKVLVKQEENSKKGNRTPFQYLSSSDSKISYETFKKHILNLAKGKGRISKTKKEYLLEERDINRFSVQKDFINRNLVDTRYATRGLMNLLRSYFRVNNLDVKVKSINGGFTSFLRRKWKFKKERNKGYKHHAEDALIIANADFIFKEWKKLDKAKKVMENQMFEEKQAESMPEIETEQEYKEIFITPHQIKHIKDFKDYKYSHRVDKKPNRELINDTLYSTRKDDKGNTLIVNNLNGLYDKDNDKLKKLINKSPEKLLMYHHDPQTYQKLKLIMEQYGDEKNPLYKYYEETGNYLTKYSKKDNGPVIKKIKYYGNKLNAHLDITDDYPNSRNKVVKLSLKPYRFDVYLDNGVYKFVTVKNLDVIKKENYYEVNSKCYEEAKKLKKISNQAEFIASFYNNDLIKINGELYRVIGVNNDLLNRIEVNMIDITYREYLENMNDKRPPRIIKTIASKTQSIKKYSTDILGNLYEVKSKKHPQIIKKG

SEQ ID NO: 250 - protein, 1063 aa, Simonsiella muelleri
MEKFHYVLGLDLGIASVGWAAIEIDKETETSIGLLDCGVRTFERAEVPKTGDSLAKARREARSTRRLIRRRSHRLLRLKRLLKREIFRQPETFKDLPINAWQLRVKGLDSRLNEYEWAAVLLHLVKHRGYLSQRKSEMSETDSKSEMGRLLAGVAENHQLLQQEQYRTPAELALKKFVKHFRNKGGDYAHTFNRLDLQAELHLLFQKQRELGNPFTSPELERQVDDLLMTQRSALQGDAILKMLGHCGFEPEQFKAAKNTFSAERFIWLTKLNNLRIQDQGKERALTADERTKLLDEPYKKSKLTYAQVRKLLSLPQTAIFKGLRYDLEHDKKAENSTLMEMKSYHNIRQTLEKSGLKTEWQSIATQPEILDAIGTAFSIYKTDEDISHELKTCRLPENVLNELLKNINFDGFIQLSLTALRKILPLMEQGYRYDEACTQIYGNHHSGSLQQESKQFLPHIPIDDVRNPVVFRTLTQARKVVNAIIRRYGSPARVHIEMARELGKSKSDRDRIEKQQQKNKKERENAVAKFKEDFPDFVGEPRGKDILKMRLYEQQHGKCLYSGHDIDINRLNEKGYVEIDHALPFSRTWDDSQNNKVLVLGSENQNKRNQTPDEYLDGANNSQRWLEFQARVQTCHFSYGKKQRIQLAKLDDETEKGFLERNLNDTRYIARFMCQFVQENLYLTGKGKRLVFASNGGMTATLRNLWGLRKVREDNDRHHALDAIVVACSTASMQQKITKAFQRHESIEYVDTETGEVKFRIPQPWDFFRQEVMIRVFSDQPCEDLVEKLSARPEALHDNVTPLFVSRAPNRKMSGQGHLETIKSAKRLSEENSMVKKPLTTLKLKDIPEIVGYPSREPQLYAALKTRLETHDDDPIKAFAKPFYKPNKNGELGALVRSVRVKGVQNTGVMVHDGKGIADNATMVRVDVYTKAGKNYLVPVYVWQVAQGILPNRAVTSGKSEADWDLIDESFEFKFSLSRGDLVEMISNKGRIFGYYNGLDRANGSIGIREHDLEKSKGKDGVHRVGVKTATAFNKYHVDPLGKEIHRCSSEPRPTLKIKSKK

SEQ ID NO: 251 - protein, 1509 aa, Psychroflexus torquis
MKRILGLDLGTNSIGWSLIEHDFKNKQGQIEGLGVRIIPMSQEILGKFDAGQSISQTADRTKYRGVRRLYQRDNLRRERLHRVLKILDFLPKHYSESIDFQDKVGQFKPKQEVKLNYRKNEKNKHEFVFMNSFIEMVSEFKNAQPELFYNKGNGEETKIPYDWTLYYLRKKALTQQITKEELAWLILNFNQKRGYYQLRGEDIDEDKNKKYMQLKVNNLIDSGAKVKGKVLYNVIFDNGWKYEKQIVNKDEWEGRTKEFIITTKTLKNGNIKRTYKAVDSEIDWAAIKAKTEQDINKANKTVGEYIYESLLDNPSQKIRGKLVKTIERKFYKEEFEKLLSKQIELQPELFNESLYKACIKELYPRNENHQSNNKKQGFEYLFTEDIIFYQRPLKSQKSNISGCQFEHKIYKQKNKKTGKLELIKEPIKTISRSHPLFQEFRIWQWLQNLKIYNKEKIENGKLEDVTTQLLPNNEAYVTLFDFLNTKKELEQKQFIEYFVKKKLIDKKEKEHFRWNFVEDKKYPFSETRAQFLSRLAKVKGIKNTEDFLNKNTQVGSKENSPFIKRIEQLWHIIYSVSDLKEYEKALEKFAEKHNLEKDSFLKNFKKFPPFVSDYASYSKKAISKLLPIMRMGKYWSESAVPTQVKERSLSIMERVKVLPLKEGYSDKDLADLLSRVSDDDIPKQLIKSFISFKDKNPLKGLNTYQANYLVYGRHSETGDIQHWKTPEDIDRYLNNFKQHSLRNPIVEQVVMETLRVVRDIWEHYGNNEKDFFKEIHVELGREMKSPAGKREKLSQRNTENENTNHRIREVLKELMNDASVEGGVRDYSPSQQEILKLYEEGIYQNPNTNYLKVDEDEILKIRKKNNPTQKEIQRYKLWLEQGYISPYTGKIIPLTKLFTHEYQIEHIIPQSRYYDNSLGNKIICESEVNEDKDNKTAYEYLKVEKGSIVFGHKLLNLDEYEAHVNKYFKKNKTKLKNLLSEDIPEGFINRQLNDSRYISKLVKGLLSNIVRENGEQEATSKNLIPVTGVVTSKLKQDWGLNDKWNEIIAPRFKRLNKLTNSNDFGFWDNDINAFRIQVPDSLIKGFSKKRIDHRHHALDALVVACTSRNHTHYLSALNAENKNYSLRDKLVIKNENGDYTKTFQIPWQGFTIEAKNNLEKTVVSFKKNLRVINKTNNKFWSYKDENGNLNLGKDGKPKKKLRKQTKGYNWAIRKPLHKETVSGIYNINAPKNKIATSVRTLLTEIKNEKHLAKITDLRIRETILPNHLKHYLNNKGEANFSEAFSQGGIEDLNKKITTLNEGKKHQPIYRVKIFEVGSKFSISEDENSAKSKKYVEAAKGTNLFFAIYLDEENKKRNYETIPLNEVITHQKQVAGFPKSERLSVQPDSQKGTFLFTLSPNDLVYVPNNEELENRDLFNLGNLNVEQISRIYKFTDSSDKTCNFIPFQVSKLIFNLKKKEQKKLDVDFIIQNEFGLGSPQSKNQKSIDDVMIKEKCIKLKIDRLGNISKA

SEQ ID NO: 252 - protein, 1112 aa, Staphylococcus simulans
MLVGLKFKQSILFENMENAEDIKESATGSDAISLSDDYYENLSEFLTDEQLNFIESANTFFMGIMLDRILKGATSISAAKVRDYKIFKSQLKLIKDIVYQNKYDKYHEFFVTSKEDMRAYQENPDAKNFGKLSKFDQYLIHSKDQYAKLMKDLKGLVPKEYTEVLNLIDEQKFLVVQNTTDNASIPYQNNVFEAENILRNQQKYYPEITEEMIGKVINLISFRIPYYVGPLTNKNGQSDFAWMIRKSDEQTLPWNFDKVIDKSKSAEKFIRRMTSKCTYLLEEDVLPKHSLLYQEMEVLNELNNVQLRGENEPKHRIHRLDPKVKQFIYHNLFQKKKNVTHKDLITLLQNSEHRNTLNKTSGQKLKVFGTQNDSKFASKLSTYNDMKAILGSVENKRQMIEELVLWITIFEDKAILKQKIGEKYPNITEKQLNQIVKLNYSGWGRLSEKLLTKEVNGRSLIDLMYSTENNFMEIITDKTLGFDCFIKNSNKVKNAKISYKDVAELRTSPALKKGIWNAIKMVREISNLFGAPEKIIIEFATEDQAKGKRQKSRSELWDDLVKKNNLKRNKEFEGLFEELKAYPDLDFSNPKLWLYIHQNGKCMYTKKPIDLERLMSDTNNQLYEIDHILPRTFVKDDSINNKVLVIQSANQKKSGDKMPLEIFDNHVLVPFWKMLYENDLISSSKLSKLMKKEFNDLDKEGFIQRQLVETRQIISHVSDFLTEEYPSTTVVPMKANVVSELRRKFDIPKIRQLNDWHHAVDAYLNGFVYQAARVFYPKVNLFEFNFKWEKVREKWRQLGEFTENNKKREFFLFKRMENYVNEYGEGMISKLIFDLDNFKFNYSRKVESTESAFYKQSAFSPKNTTAQYDSDKNKTAIYKEMKNKRGIVVSYTYVKKDQELIGYGVFNETVFEYVNNADVDMNTRALKIVRKAFPKLDIKKAQYLFSINKGDALLVNGHPFLFVSAYERINGKQLEFDIAMQRKIKQALSPYNNMTEQEKVEFYNQFAEKVIEEFRNSIGLQSRDRKVNLIKNLFNNTEKSNDSMTQSILEVLKMTKVSAERSKELKIRWNGQTPNTFIDTKNNAEIQYKSITGLKTTKPKSIFKLAESKNEL

SEQ ID NO: 253 - protein, 1274 aa, Mycoplasma gallisept
MNINMNNSIKSKPEVTIGLDLGVGSVGWAIVDNETNIIHHLGSRLFSQAKTAEDRRSFRGVRRLIRRRKYKLKRFVNLIWKYNSYFGFKNKEDILNNYQEQQKLHNTVLNLKLEALNAKIDPKALSWILHDYLKNRGHFYEDNRDFNVYPTEELANYFDEFGYYKGIIDSKNDDDDKLEEGLTKYKFSNQHWLEEVKKVLSNQTGLPEKFKEEYESLFSYVRNYSEGPGSINSVSPYGIYHLDEKEGKVVQKYNNIWDKTIGKCSIFPDEYRAPKNSPIAMIFNEINELSTIRSYSIYLTGWFINQEFKKAYLNKLLDLLIKTNSEKPIDARQFKKLREETIAESIGKETLKDVESEEKLEKDDHKWKLKGLKLNTNGKIQYNDLSSLAKFVHKLKQHLKLDFLLEDQYTPLDKINFLQSLYVYLGKHLRYSNRVDSANLKEFSDSSRLFERVLQEQKDGLFKLFEQTDKDDEKILTQTHSLSTKAMLLAITRMTNLDNDEDNQKNNDKGWNFEAIKNFDQKFIDITKTNNNLSLKQDKRYLDDQFINDAILSPGVKRILREATKVFNAILKQFSEEYDVTKVVIELARELSEEKELENTKNYKKLIKKNGDKISEGLKALGIAEDKIEEILKSPTKSYKVLLWLQQDHIDPYSQKEIAFDDILTKTEKTEIDHIIPYSISFDDSSSNKLLVLAESNQAKSNQTPYEFINSGKAEITWEVYEAYCHKFKNGDSSLLDSTQRSKKFAKMMKTDTSSKYDIGFLARNLNDTRYATIVFRDALKDYANNHLVEDKPMFKVVCINGGVTSFLRKNFDPKSWYAKKDRDKNIHHAVDASIISIFSNETKTLFNQLTKFADYKLFKNTDGSWKKIDPKTGVVSEVTDENWKQIRVRNQVSEIAKVIDKYIQDSNIERKARYSRKIENKTNISLFNDTVYSAKKVGYEDQIKRKNLKTLDIHESAEENKNSKVKKQFVYRKLVNVSLLNNDKLADLFAEKEDILMYRANPWVINLAEQIFNEYTENKKIKSQNVFEKYMLDLTKEFPEKFSEAFVKSMIRNKTAIIYNVEKDVVHRIKRLKILSSELKENKWSNVIIRSKNESGTKLSYQDTINSIALMIMRSIDPTAKKQYIRVPLNTLNLHLGDQDFDLHNIDAYLKKPKFVKYLKANEIGDEYKPWRVLTSGTLLIHKKDKKLMYISSFQNLNDLIEIKNLIETEYKENVDSDPKKKKKASQILRSLSVILNDYILLDAKYNFDILGLSKNKIDEILNSKLDLDKIAK

SEQ ID NO: 254 - protein, 1122 aa, Artificial Sequence; identical to SEQ ID NO: 23
  Synthetic Sequence

SEQ ID NO: 255 - protein, 1236 aa, Artificial Sequence; identical to SEQ ID NO: 21
  Synthetic Sequence

SEQ ID NO: 256 - protein, 1059 aa, Artificial Sequence; identical to SEQ ID NO: 15
  Synthetic Sequence

SEQ ID NO: 257 - protein, 1166 aa, Artificial Sequence; identical to SEQ ID NO: 39
  Synthetic Sequence

SEQ ID NO: 258 - protein, 1149 aa, Artificial Sequence; identical to SEQ ID NO: 37
  Synthetic Sequence

SEQ ID NO: 259 - protein, 1314 aa, Artificial Sequence; identical to SEQ ID NO: 27
  Synthetic Sequence

SEQ ID NO: 260 - protein, 1064 aa, Artificial Sequence; identical to SEQ ID NO: 38
  Synthetic Sequence

SEQ ID NO: 261 - protein, 1401 aa, Artificial Sequence
  Synthetic Sequence
MDKKYSIGLDIGTNSVGWAVITDEYKVPSKKFKVLGNTDRHSIKKNLIGALLFDSGETAEATRLKRTARRRYTRRKNRICYLQEIFSNEMAKVDDSFFHRLEESFLVEEDKKHERHPIFGNIVDEVAYHEKYPTIYHLRKKLVDSTDKADLRLIYLALAHMIKFRGHFLIEGDLNPDNSDVDKLFIQLVQTYNQLFEENPINASGVDAKAILSARLSKSRRLENLIAQLPGEKKNGLFGNLIALSLGLTPNFKSNFDLAEDAKLQLSKDTYDDDLDNLLAQIGDQYADLFLAAKNLSDAILLSDILRVNTEITKAPLSASMIKRYDEHHQDLTLLKALVRQQLPEKYKEIFFDQSKNGYAGYIDGGASQEEFYKFIKPILEKMDGTEELLVKLNREDLLRKQRTFDNGSIPHQIHLGELHAILRRQEDFYPFLKDNREKIEKILTFRIPYYVGPLARGNSRFAWMTRKSEETITPWNFEEVVDKGASAQSFIERMTNFDKNLPNEKVLPKHSLLYEYFTVYNELTKVKYVTEGMRKPAFLSGEQKKAIVDLLFKTNRKVTVKQLKEDYFKKIECFDSVEISGVEDRFNASLGTYHDLLKIIKDKDFLDNEENEDILEDIVLTLTLFEDREMIEERLKTYAHLFDDKVMKQLKRRRYTGWGRLSRKLINGIRDKQSGKTILDFLKSDGFANRNFMQLIHDDSLTFKEDIQKAQVSGQGDSLHEHIANLAGSPAIKKGILQTVKVVDELVKVMGRHKPENIVIEMARENQTTQKGQKNSRERMKRIEEGIKELGSQILKEHPVENTQLQNEKLYLYYLQNGRDMYVDQELDINRLSDYDVDHIVPQSFLKDDSIDNKVLTRSDKNRGKSDNVPSEEVVKKMKNYWRQLLNAKLITQRKFDNLTKAERGGLSELDKAGFIKRQLVETRQITKHVAQILDSRMNTKYDENDKLIREVKVITLKSKLVSDFRKDFQFYKVREINNYHHAHDAYLNAVVGTALIKKYPKLESEFVYGDYKVYDVRKMIAKSEQEIGKATAKYFFYSNIMNFFKTEITLANGEIRKRPLIETNGETGEIVWDKGRDFATVRKVLSMPQVNIVKKTEVQTGGFSKESILPKRNSDKLIARKKDWDPKKYGGFDSPTVAYSVLVVAKVEKGKSKKLKSVKELLGITIMERSSFEKNPIDFLEAKGYKEVKKDLIIKLPKYSLFELENGRKRMLASAGELQKGNELALPSKYVNFLYLASHYEKLKGSPEDNEQKQLFVEQHKHYLDEIIEQISEFSKRVILADANLDKVLSAYNKHRDKPIREQAENIIHLFTLTNLGAPAAFKYFDTTIDRKRYTSTKEVLDATLIHQSITGLYETRIDLSQLGGDAYPYDVPDYASLGSGSPKKKRKVEDPKKKRKVD

SEQ ID NO: 262 - protein, 1368 aa, Artificial Sequence
  Synthetic Sequence
MDKKYSIGLAIGTNSVGWAVITDDYKVPSKKLKGLGNTDRHGIKKNLIGALLFDSGETAEATRLKRTARRRYTRRKNRICYLQEIFSNEMAKVDDSFFHRLEESFLVEEDKKHERHPIFGNIVDEVAYHEKYPTIYHLRKKLADSTDKVDLRLIYLALAHMIKFRGHFLIEGDLNPDNSDVDKLFIQLVQTYNQLFEENPINASRVDAKAILSARLSKSRRLENLIAQLPGEKKNGLFGNLIALSLGLTPNFKSNFDLAEDAKLQLSKDTYDDDLDNLLAQIGDQYADLFLAAKNLSDATLLSDILRVNSEITKAPLSASMIKRYDEHHQDLTLLKALVRQQLPEKYKEIFFDQSKNGYAGYIDGGASQEEFYKFIKPILEKMDGTEELLAKLNREDLLRKQRTFDNGSIPYQIHLGELHAILRRQEDFYPFLKDNREKIEKILTFRIPYYVGPLARGNSRFAWMTRKSEETITPWNFEEVVDKGASAQSFIERMTNFDKNLPNEKVLPKHSLLYEYFTVYNELTKVKYVTEGMRKPAFLSGEQKKAIVDLLFKTNRKVTVKQLKEDYFKKIECFDSVEISGVEDRFNASLGTYHDLLKIIKDKDFLDNEENEDILEDIVLTLTLFEDREMIEERLKTYAHLFDDKVMKQLKRRRYTGWGRLSRKLINGIRDKQSGKTILDFLKSDGFANRNFMQLIHDDSLTFKEDIQKAQVSGQGDSLHEHIANLAGSPAIKKGILQTVKVVDELVKVMGRHKPENIVIEMARENQTTQKGQKNSRERMKRIEEGIKELGSDILKEYPVENTQLQNEKLYLYYLQNGRDMYVDQELDINRLSDYDVDHIVPQSFLKDDSIDNKVLTRSDKNRGKSDNVPSEEVVKKMKNYWRQLLNAKLITQRKFDNLTKAERGGLSELDKVGFIKRQLVETRQITKHVAQILDSRMNTKYDENDKLIREVRVITLKSKLVSDFRKDFQFYKVREINNYHHAHDAYLNAVVGTALIKKYPKLESEFVYGDYKVYDVRKMIAKSEQEIGKATAKYFFYSNIMNFFKTEITLANGEIRKRPLIETNGETGEIVWDKGRDFATVRKVLSMPQVNIVKKTEVQTGGFSKESILPKRNSDKLIARKKDWDPKKYGGFDSPTVAYSVLVVAKVEKGKSKKLKSVKELLGITIMERSSFEKDPIDFLEAKGYKEVRKDLIIKLPKYSLFELENGRKRMLASAGELQKGNELALPSKYVNFLYLASHYEKLKGSPEDNEQKQLFVEQHKHYLDEIIEQISEFSKRVILADANLDKVLSAYNKHRDKPIREQAENIIHLFTLTNLGAPAAFKYFDTTIDRKRYTSTKEVLDATLIHQSITGLYETRIDLSQLGGD

SEQ ID NO: 263 - protein, 1368 aa, Artificial Sequence
  Synthetic Sequence
MDKKYSIGLDIGTNSVGWAVITDDYKVPSKKLKGLGNTDRHGIKKNLIGALLFDSGETAEATRLKRTARRRYTRRKNRICYLQEIFSNEMAKVDDSFFHRLEESFLVEEDKKHERHPIFGNIVDEVAYHEKYPTIYHLRKKLADSTDKVDLRLIYLALAHMIKFRGHFLIEGDLNPDNSDVDKLFIQLVQTYNQLFEENPINASRVDAKAILSARLSKSRRLENLIAQLPGEKKNGLFGNLIALSLGLTPNFKSNFDLAEDAKLQLSKDTYDDDLDNLLAQIGDQYADLFLAAKNLSDATLLSDILRVNSEITKAPLSASMIKRYDEHHQDLTLLKALVRQQLPEKYKEIFFDQSKNGYAGYIDGGASQEEFYKFIKPILEKMDGTEELLAKLNREDLLRKQRTFDNGSIPYQIHLGELHAILRRQEDFYPFLKDNREKIEKILTFRIPYYVGPLARGNSRFAWMTRKSEETITPWNFEEVVDKGASAQSFIERMTNFDKNLPNEKVLPKHSLLYEYFTVYNELTKVKYVTEGMRKPAFLSGEQKKAIVDLLFKTNRKVTVKQLKEDYFKKIECFDSVEISGVEDRFNASLGTYHDLLKIIKDKDFLDNEENEDILEDIVLTLTLFEDREMIEERLKTYAHLFDDKVMKQLKRRRYTGWGRLSRKLINGIRDKQSGKTILDFLKSDGFANRNFMQLIHDDSLTFKEDIQKAQVSGQGDSLHEHIANLAGSPAIKKGILQTVKVVDELVKVMGRHKPENIVIEMARENQTTQKGQKNSRERMKRIEEGIKELGSDILKEYPVENTQLQNEKLYLYYLQNGRDMYVDQELDINRLSDYDVDAIVPQSFLKDDSIDNKVLTRSDKNRGKSDNVPSEEVVKKMKNYWRQLLNAKLITQRKFDNLTKAERGGLSELDKVGFIKRQLVETRQITKHVAQILDSRMNTKYDENDKLIREVRVITLKSKLVSDFRKDFQFYKVREINNYHHAHDAYLNAVVGTALIKKYPKLESEFVYGDYKVYDVRKMIAKSEQEIGKATAKYFFYSNIMNFFKTEITLANGEIRKRPLIETNGETGEIVWDKGRDFATVRKVLSMPQVNIVKKTEVQTGGFSKESILPKRNSDKLIARKKDWDPKKYGGFDSPTVAYSVLVVAKVEKGKSKKLKSVKELLGITIMERSSFEKDPIDFLEAKGYKEVRKDLIIKLPKYSLFELENGRKRMLASAGELQKGNELALPSKYVNFLYLASHYEKLKGSPEDNEQKQLFVEQHKHYLDEIIEQISEFSKRVILADANLDKVLSAYNKHRDKPIREQAENIIHLFTLTNLGAPAAFKYFDTTIDRKRYTSTKEVLDATLIHQSITGLYETRIDLSQLGGD

SEQ ID NO: 264 - protein, 1368 aa, Artificial Sequence
  Synthetic Sequence
MDKKYSIGLAIGTNSVGWAVITDDYKVPSKKLKGLGNTDRHGIKKNLIGALLFDSGETAEATRLKRTARRRYTRRKNRICYLQEIFSNEMAKVDDSFFHRLEESFLVEEDKKHERHPIFGNIVDEVAYHEKYPTIYHLRKKLADSTDKVDLRLIYLALAHMIKFRGHFLIEGDLNPDNSDVDKLFIQLVQTYNQLFEENPINASRVDAKAILSARLSKSRRLENLIAQLPGEKKNGLFGNLIALSLGLTPNFKSNFDLAEDAKLQLSKDTYDDDLDNLLAQIGDQYADLFLAAKNLSDATLLSDILRVNSEITKAPLSASMIKRYDEHHQDLTLLKALVRQQLPEKYKEIFFDQSKNGYAGYIDGGASQEEFYKFIKPILEKMDGTEELLAKLNREDLLRKQRTFDNGSIPYQIHLGELHAILRRQEDFYPFLKDNREKIEKILTFRIPYYVGPLARGNSRFAWMTRKSEETITPWNFEEVVDKGASAQSFIERMTNFDKNLPNEKVLPKHSLLYEYFTVYNELTKVKYVTEGMRKPAFLSGEQKKAIVDLLFKTNRKVTVKQLKEDYFKKIECFDSVEISGVEDRFNASLGTYHDLLKIIKDKDFLDNEENEDILEDIVLTLTLFEDREMIEERLKTYAHLFDDKVMKQLKRRRYTGWGRLSRKLINGIRDKQSGKTILDFLKSDGFANRNFMQLIHDDSLTFKEDIQKAQVSGQGDSLHEHIANLAGSPAIKKGILQTVKVVDELVKVMGRHKPENIVIEMARENQTTQKGQKNSRERMKRIEEGIKELGSDILKEYPVENTQLQNEKLYLYYLQNGRDMYVDQELDINRLSDYDVDAIVPQSFLKDDSIDNKVLTRSDKNRGKSDNVPSEEVVKKMKNYWRQLLNAKLITQRKFDNLTKAERGGLSELDKVGFIKRQLVETRQITKHVAQILDSRMNTKYDENDKLIREVRVITLKSKLVSDFRKDFQFYKVREINNYHHAHDAYLNAVVGTALIKKYPKLESEFVYGDYKVYDVRKMIAKSEQEIGKATAKYFFYSNIMNFFKTEITLANGEIRKRPLIETNGETGEIVWDKGRDFATVRKVLSMPQVNIVKKTEVQTGGFSKESILPKRNSDKLIARKKDWDPKKYGGFDSPTVAYSVLVVAKVEKGKSKKLKSVKELLGITIMERSSFEKDPIDFLEAKGYKEVRKDLIIKLPKYSLFELENGRKRMLASAGELQKGNELALPSKYVNFLYLASHYEKLKGSPEDNEQKQLFVEQHKHYLDEIIEQISEFSKRVILADANLDKVLSAYNKHRDKPIREQAENIIHLFTLTNLGAPAAFKYFDTTIDRKRYTSTKEVLDATLIHQSITGLYETRIDLSQLGGD

SEQ ID NO: 265 - protein, 240 aa, Acetobacter aceti
MANIAENLVFGIDLGIGSCGWAVLNQKAKDENIVALGSWCFDVPETDKERIPTNQIRRANRLLRRVIRRRRNRMAEIRRLFASKGMLDTADPDALAKISADPWEMRAKGLDYQLTPQEFAVALGHIAKRRGFKSAAKRVSTNAPSEDSKMLAALEKTKEQSAQYRTIGEMFARDPAYADRRRNRDGCFDRTMSREDLFKETQILFESQRRLGNFSATSETEQAFIDIAFRQKPMQDSERL

SEQ ID NO: 266 - protein, 400 aa, Acetobacter aceti
SFERFRLLCRLVNLRVTDGLEDRPLTPEELRLACEDAGKTRKLSVKKVRSLIGLRDDQRFTTIPPDQEQHDIAARTGDALTGTATFRAILGESFWRQLLPHPEQLDRAAWIISFHELTDTIISKLATIGLPSEVMELIRKALEDGKFSKFKGAASLSDKAARKLIPFLQEGLTYDKACQKAGYNHAASKFTHYDSIDTKAKFNSLMDDVRDSITNPVARKAISEGMKQVWAMRNQWGLPGAICIELARDVGNSAEKRREIESGIKKNTAQRERERQEAKEHLNQSDISSETLLRYRLWKEQGGRCCYTDQPITPSQLIASDNSVQVDHILPWSRFGDDSYLNKALCTAKANQEKKNRTPWEWIHNQKGVEAWNHFTAAVESRKETRGLKKRNFLLKSSKE

SEQ ID NO: 267 - protein, 376 aa, Acetobacter aceti
YAARVMAEAVRLLYPSGNRAEKGGVKRVFTRPGALTAALRHAWGVESLKKINGKRLNDDRHHALDAAVVAAVSEKEIQKLTKSFQICEQKGLARPMRDVPMPWEGFRHQLETAYADIRVARPERRRARGKGHDATIRQLREEKDGPVVYERRAISDLKLTDLERIKDPERNSAIISSLRTWIEKGKPADYPPQSPKGDEIRKIRVMSRNKPAVSVRGGTADRGEMTRVDVFTKMGKKGKPEWFLVPIYRHQVIDRIQWPQPPNQAAANGKSEKNWPTMGLEHEFRFSLYPRSYVQIVKRDGEIIEGYFAGLDRTVAAFSLLSSSDPTSIQRGIGAKTLESIRKYNVNRFGDISMVEQETRTWHGDVCISPDQPDSA

SEQ ID NO: 268 - protein, 1054 aa, Actinobacillus suis
MKLTPLNYILGLDLGIASVGWAVVEIDEQENPLGLIDVGVRTFDRAEVPKTGESLALARRLARSARRLVKRRADRIKKAKRLLKAENILLSADEHLPNDVWQLRVKGLDQKLERQEWAAVLLHLLKHRGYLSQRKNESKSENKELGALLSGVETNHQILQSAEYRTPAEIAVKKFHVEDGHIRNQRGAYTHTFSRLDLLAEMELLFQRQTDLGNPHTSAKLLENLTALLMWQKPALAGEAILKMLGKCTFEPTEYKAAKNSYSAERFVWLTKLNNLRILEQGAERALTDNERFALLDQPYEKAKFTYAQARTMLALPDEAIFKGVRYQGEDKKAVETKTILMEMKAYHQIRKALENADLKAEWNELKNNSELLDDIGTAFSLHKTDEDICRYLDGKLSESILNALLENLNFDKFIQLSLKALQQILPLMLQGQRYDEAVSAIYGDHYGKKSAEINRLLPTIPADEIRNPVVLRTLTQARKVINAVVRLYGSPARIHIETGREVGKSYQDRKKLEKQQEDNRKQRESAVKKFKEYFPNFVGEPKGKDILKMRLYELQQAKCLYSGKSLELHRLLEKGYVEVDHALPFSRTWDDSFNNKVLVLANENQNKGNLTPYEWLDGKNNSEHWQNFVARVQTSGFSHTKKQRILSHKLDEKGFIERNLNDTRYVARFLCNFIADNMLLTGKGKRKVFASNGQITALLRGRWGLQKVRDDNDRHHALDAVVVACSTVVMQQKITRFVRYEEGNVFSGERIDRETGEIIPLHFPSPWAFFRENVEIRIFSENPKLELENRLPDYPQYNHEFVQPLFVSRMPTRKMTGQGHMETVKSAKRLDEGLSVLKVPLTQLKLSDLERMVNREREVTLYESLKARLEQFGNDPAKAFAEPFHKKGGAVVKAVRVEQTQKSGVLVRDGNGVADNASMVRVDVFTKGGKYFLVPIYTWQVAKGILPNKAVTANVDEIDWLEMDESYQFIFTMYPNDLVKVKLKKEEFFGYYGGLDRATGAIVIKEHDLEKSKGKQGIYRIGVKLALSFEKYQVDELGKNIRPCRPTKRQHVR

SEQ ID NO: 269 - protein, 239 aa, Actinobacillus ureae
MEIRIFSENPKLGLENRLPGYPQYNHEFVQPLFVSRMPTRKMTGKGHMETVKSAKRLDEGLSVLKVPLTQLKLSDLERMVNREREDALYQSLKAHLEQFGNDPAKAFAEPFHKKGGTVVKAVRVEQTQKSGVLVRDGNGVADNTSMVRVDVFTKAGKYFLVPIYKWQVAKRILPNKAVTAGVDEIDWLEMDSSYQFIFTMYANDLVKVKLKKRSILGLLRWFRSCNWGYCYQRTRFREI

SEQ ID NO: 270 - protein, 400 aa, Actinobacillus ureae
MKLTPLNYILGLDLGIASVGWAVVEIDEQENPLGLIDVGVRTFDRAEVAKTGESLALARRLARSSRRLVKRRADRIKKAKRLLKAENLLLSADEILPNDVWQLRVKGLDQKLERQEWAAVLLHILKHRGYLSQRKNESKSENKELGALLSGVATNHQLLQTAEYRTPAEITVKKFQAEENGHGHIRNQRGDYSHTFDRKDLLAEMKLLFQRQAELGNPHTSEKLLENLTTLLLWQKPALAGEAILKMLGKCTFEPAEYKAAKNSYSAERFVWLTKLNNLRILENGIERALTDNERFTLLDQPYEKAKLTYAQARTMLALSDEAIFKGVRYQGEDKKAAEKVALIEMKGYQHIRKALEGAGLKAEWNELKNNSELLDDIGTAFSLYFSISNLPTEIAYFTP

SEQ ID NO: 271 - protein, 1113 aa, Actinomyces georgiae
MSASSQNVERIRYKVGIDVGLRSIGFCAVQVDADDRPVKLLNTVVHVHDAGVSPADAKKADTRKLVSGVARRTRRLYRTRKRRLVDLDRQLDGLGWPLVDPARFADPREPWFAREKLVSGRVDDADERKELLSVALRHIAHHRGWRNPYSTVESLQADAPPSEFLQGLNQRVSEKLGTELDPGLTQGQLVAKLLHRFPNAKIRGPEGILRGKLHQSDNAGELRLICRTQGLDCHITEELVRLVFQAKSPKANKEMRKRIGRDQLPGQGAHIRAEKAHPVFQRFRIVAVLANLRIREAHVDRRLTAEEMRTLTDFLLGLAGSEQPTWEELADNLNIERHQLRGTAKASVDGAPALRFPPIDATTDRIYASKLKWLAEWWRQADEERRGYMVDALSNSGGSEDEPYLDDEIAEMLEQASEEDQAKLDSLHLPGGRASYCLDTLRRLTDAMLGGGLDLFEARKAVFHVDDDWAPPTDPIGAPVGNPPVDRVLKHVARWLEAATGRWGAPQTINIEHVREGLGSEKAARELTRMNDRRRRNNQKLVEEMGEKLGMSGRIRRSDRMRYEAIRRQNCECLYCGQPITYQTMEMDHIVPRAGAASTNSRSNLAAVCRRCNHQKGKLPFAVWAESQDSPAEVRLQDAVQRVRHWLRDAGMGQKELQALRVQVIARLKSKRPDEEFDGRSMESIAWMANELRARVEAQYRGSGTTVRVYRGALTAEARKASGFEGRVNLIGGRGKDRFDRRHHAMDALVIALMNQSVAQTLALRLNMRDSQWLTQSEQTWRQFHGAPGEAARKWEAWDRDMRDASDLFNLALDGGRIPITENVRLRVGNGRVHEDGVIRFKPEYEVKGKTIKGGEARLLGDSLPSEQIDRAETPALWTALTRLPEYDRKSGLPENPDRVIRVNGAVVQATDRIRFFGTPASVAVRGGYAKLGESIHHARIYRINGKTPKYAMIRVYTIDLMRLNHEDIFTAVLKPSTISMRCAEKKLKYAIAEGNAEQIGWLVEGDQLELDAAAYAKGVGADLMREYPMATCWRVAGFPDEAKLRLRPVLLAAEGMGEDAPKFMREVLENQGWRPAVNALLSPGSVRVVRRNVLGEPRFKSSGHLPTTVDLV

SEQ ID NO: 272 - protein, 1101 aa, Actinomyces naeslundii
MWYASLMSAHHLRVGIDVGTHSVGLATLRVDDHGTPIELLSALSHIHDSGVGKEGKKDHDTRKKLSGIARRARRLLHHRRTQLQQLDEVLRDLGFPIPTPGEFLDLNEQTDPYRVWRVRARLVEEKLPEELRGPAISMAVRHIARHRGWRNPYSKVESLLSPAEESPFMKALRERILATTGEVLDDGITPGQAMAQVALTHNISMRGPEGILGKLHQSDNANEIRKICARQGVSPDVCKQLLRAVFKADSPRGSAVSRVAPDPLPGQGSFRRAPKCDPEFQRFRIISIVANLRISETKGENRPLTADERRHVVTFLTEDSQADLTWVDVAEKLGVHRRDLRGTAVHTDDGERSAARPPIDATDRIMRQTKISSLKTWWEEADSEQRGAMIRYLYEDPTDSECAEIIAELPEEDQAKLDSLHLPAGRAAYSRESLTALSDHMLATTDDLHEARKRLFGVDDSWAPPAEAINAPVGNPSVDRTLKIVGRYLSAVESMWGTPEVIHVEHVRDGFTSERMADERDKANRRRYNDNQEAMKKIQRDYGKEGYISRGDIVRLDALELQGCACLYCGTTIGYHTCQLDHIVPQAGPGSNNRRGNLVAVCERCNRSKSNTPFAVWAQKCGIPHVGVKEAIGRVRGWRKQTPNTSSEDLTRLKKEVIARLRRTQEDPEIDERSMESVAWMANELHHRIAAAYPETTVMVYRGSITAAARKAAGIDSRINLIGEKGRKDRIDRRHHAVDASVVALMEASVAKTLAERSSLRGEQRLTGKEQTWKQYTGSTVGAREHFEMWRGHMLHLTELFNERLAEDKVYVTQNIRLRLSDGNAHTVNPSKLVSHRLGDGLTVQQIDRACTPALWCALTREKDFDEKNGLPAREDRAIRVHGHEIKSSDYIQVFSKRKKTDSDRDETPFGAIAVRGGFVEIGPSIHHARIYRVEGKKPVYAMLRVFTHDLLSQRHGDLFSAVIPPQSISMRCAEPKLRKAITTGNATYLGWVVVGDELEINVDSFTKYAIGRFLEDFPNTTRWRICGYDTNSKLTLKPIVLAAEGLENPSSAVNEIVELKGWRVAINVLTKVHPTVVRRDALGRPRYSSRSNLPTSWTIE

SEQ ID NO: 273 - protein, 1181 aa, Unknown
  Actinomyces sp.
MLHCIAVIRVPPSEEPGFFETHADSCALCHHGCMTYAANDKAIRYRVGIDVGLRSIGFCAVEVDDEDHPIRILNSVVHVHDAGTGGPGETESLRKRSGVAARARRRGRAEKQRLKKLDVLLEELGWGVSSNELLDSHAPWHIRKRLVSEYIEDETERRQCLSVAMAHIARHRGWRNSFSKVDTLLLEQAPSDRMQGLKERVEDRTGLQFSEEVTQGELVATLLEHDGDVTIRGFVRKGGKATKVHGVLEGKYMQSDLVAELRQICRTQRVSETTFEKLVLSIFHSKEPAPSAARQRERVGLDELQLALDPAAKQPRAERAHPAFQKFKVVATLANMRIREQSAGERSLTSEELNRVARYLLNHTESESPTWDDVARKLEVPRHRLRGSSRASLETGGGLTYPPVDDTTVRVMSAEVDWLADWWDCANDESRGHMIDAISNGCGSEPDDVEDEEVNELISSATAEDMLKLELLAKKLPSGRVAYSLKTLREVTAAILETGDDLSQAITRLYGVDPGWVPTPAPIEAPVGNPSVDRVLKQVARWLKFASKRWGVPQTVNIEHTREGLKSASLLEEERERWERFEARREIRQKEMYKRLGISGPFRRSDQVRYEILDLQDCACLYCGNEINFQTFEVDHIIPRVDASSDSRRTNLAAVCHSCNSAKGGLAFGQWVKRGDCPSGVSLENAIKRVRSWSKDRLGLTEKAMGKRKSEVISRLKTEMPYEEFDGRSMESVAWMAIELKKRIEGYFNSDRPEGCAAVQVNAYSGRLTACARRAAHVDKRVRLIRLKGDDGHHKNRFDRRNHAMDALVIALMTPAIARTIAVREDRREAQQLTRAFESWKNFLGSEERMQDRWESWIGDVEYACDRLNELIDADKIPVTENLRLRNSGKLHADQPESLKKARRGSKRPRPQRYVLGDALPADVINRVTDPGLWTALVRAPGFDSQLGLPADLNRGLKLRGKRISADFPIDYFPTDSPALAVQGGYVGLEFHHARLYRIIGPKEKVKYALLRVCAIDLCGIDCDDLFEVELKPSSISMRTADAKLKEAMGNGSAKQIGWLVLGDEIQIDPTKFPKQSIGKFLKECGPVSSWRVSALDTPSKITLKPRLLSNEPLLKTSRVGGHESDLVVAECVEKIMKKTGWVVEINALCQSGLIRVIRRNALGEVRTSPKSGLPISLNLR

SEQ ID NO: 274 - protein, 1120 aa, Unknown
  Actinomyces sp.
MNAMKQYNAGIDVGINSVGFAAIEVDSKGLPLNILNNMVVLHDSGVDPGTAKTGATRLANSGTARRTRKLIARRRKRLQKLDRYIEVQGWPLVDFSSLPDPYTPWKIRAKLTQDRLEGEEQGRGLSIALRHMARHRGWRNPYEGVESLHSPKEASKQFKDLKDRVTKVSGVIFDEDATPAEVVCDIGLSPKQRLRSAPSAKYKEGATLADEPVGGKSKEGLLGGKLMQSDNANELRKIGIVQGLSNEKVNEIIDQVFASESPKGQAGKRAKKDELPGQEQYVRALRAHLAFQRFRIVAAVANLRILEAEPKHERLLSQSEKDKVIEFLMSADGDDGVTWSDVAEELGIERECLSGTAKRGADGERPSSFPPTNSTNISIVRSKVKPLIEWWRKASDDEQATLVTALSNADELTDDQPSAETVRQFLSSPDEQSQEKIDKISLPKGRAAYSVNSLERLTRRMLKDSVDLFEARKREFGVDNNWTPTPDSIGEPVGNPAVDRVLKIVNRWLLAVTRKWGPPKVVNIEHVRVGFTSAAQTRKYEEENKTNRERNLAILEELRDKFGTSGKIRREDITRFAALRRQNCQCAYCGEAITFFDCEMDHIVPRKGPGSTNTRNNLVAICERCNKSKSNMPFSLWAQNCDIPGVSVEAVIDRVRTWIKDPELNPKQYNNFKKDVIERLRKTVDDDAIDNRSIESVAWMATELADRIGSHFRTAGANTKVRVYRGWLTSEARKASGFEGKINLIGGRGKTRLDRRHHAMDAATIALMRQSVAQTLVERASIRESDRLRRVVSSSWKDYRGADRDKQFSYGSWLNSMNALAELFNRAIDADGIPVTQNLRLRLGNGEAHDATIRSLEKKRVGASWTIGEIDRASTPQLWLALTRQEDFDQNDGLPANASRELRVKNHWFHAEENVTLFPTKSAAIAVRGGYAEIGNTIHHARLYKLPGKKLTYGMIRVFAIDLLCAWHTDLFSSPLLPESISLRTAETKVRRAVEDGAAMYIGWLVDGDEIVLDPETKAFKSNKIGEYLCEFPGTKRWKVDGFPDKEKLRLRPLQLAGEGLPEDVSAGTEEILGPKGNGWRVAINALFKSSQLVVVRRTALGMVRKLSRRHLPLTTRLRG

SEQ ID NO: 275 - protein, 1095 aa, Unknown
  Actinomyces sp.
MPAHHLRVGIDVGTHSVGLATLRVDDQGTPIELLSALSHIHDSGIGKEGQKDHDTRKKLSGVARRTRHLLRNRRERLQQLDKVLVDLGFPIPKPEEYPDLSERTDPYRVWRVRARLVEETLPEELRGPAISMAVRHIARHRGWRNPYSKVESLLSPAEESSFMKALRKRIMTKTGEVLDDDITPGQAMAQVALTHKIYMRGPEGILGKLHQSDNANEIRKICARQGISSDVCKQLLRAVFKAESPRGSAVSRVAPDPLPGQGSFRRAPKCDPEFQRFRIISIVANLRISETKGENRPLTVDERRQVVAFLMEDSQADLTWVDVAEKLRVSRQALRGTAMLTADGERSAAQPPIDVTDQIMRKTKISALKTWWDKADAERRGAMVRYLYEGLEDSECAEVIAKLPEKDHAKLDSLHLPAGRAAYSRESLTALSDHMLETTNDLHEARKRLFGVDDSWAPPAEPVGAPVGNPSVDRTLKIVARYLSAVESIWGTPEVIHVEHVRDGFTSERTAEERDKANRSRHNDNQKAIEKIQHDYGKEGYISRGDIVRFHALKLQGSACLYCGTTIGYHTCQLDHIVPQAGPGSNNRRGNLVAVCERCNHSKSNTPFAVWAQKCGIPHVGVKEAISRVNGWVEHNHSTSSGDLTRLKKEVIARLRRTQKDPEIDERSMESVAWMANELHHRIAAAYPETTVMVYRGSITAAARKAASIESRINLIGEKGRKDRLDRRHHAVDASVVALMEPSVAKTLAERSSLRGEQRLTGQEQTWKQYTGLTVGARERFEAWRGHMHRLTELFNESLAADEVYVTQNIRLRLSDGSAHTVKASKLVSHRLGDGLTVQQIDRACTPALWCALTREIDFDEKNGLPAREDRVIRVHGQEISSADCIQVFSKRKKTKSDRDEAPFGAIAVRGGFVEIGSSIHHARIYRIEGEKPAYAMLRVFTHDLLSQRHGDLFSAVIPPQSISMRCAATELRQAISEGRATYLGWIVSGDELHIPVETFTTHKIGSFLKDYPNTTRWRICGYDSETMLILKPRILSAEGLNNSSDIAEYVIKNKGWRVAINKLAKVHPTVVRRDALGRPRHSSRSNLPVTWSIE

SEQ ID NO: 276 - protein, 1144 aa, Unknown
  Actinomyces sp.
MSMIDSSENVPGIRYRVGIDVGLKSIGFCAVEVDRNDQPVRMLNSMVFIHDAGVDPNENKAAKSRKLTAGVARRTRRLYRTRHQRLVNLDRVLSKEFGWPLPDLTSFKDPREPWHVRAGLLEGYIADDEKRKEALSIALRHIARHRGWRNPYAKVETLLQPSEPSDFLKGLNDRISEELGRAFPADATPGQLVDTYLAHPDYVGRAGTPKLRGPQGILAGKLHQSDNAQEIRGICDVQRIEPAERDRLIRVVFEAKSPKGSAKERGLVGYDELPGQGRHVRAEKAHPAFQLFRMVSVLANLRIREGREERPLTPDELEDLVDFINQVSLKQEVTWQDLADKLRIERADLRGTAKASFDGSPVLRNPPTDVTTEKIMACKVKWLKEWWKEADDEQRGYMVDAFSNSGGSEDGTDVNDEVAELLEQATEDDQLEFEKISLPQGRAAYSLDSLRRLTDRMLRDGVDLHTARRLEFNVGDDWKPAVEPIGAPTGNPAVDRVLKQVSRWLHAATERWGEPTVINIEHARDGLGSERVARELMRENEKRRKANASAVAEMAAKLKLSGKVHRSDQIRYFALQRQNCQCLYCGAPITYTTAEMDHIVPRADGSSTNDRSNLAAVCRTCNHMKGKIPFAVWASSDKANQGVSLTGALERVNMWQRDSGMSPRQLKQLQREVCARLKSKKPDQEFDGRSMESVAWMAVELRTRIEGFYRSRDEESVPSVGVYRGQLTAEARRASGFESRVNLIGGRGKTRFDRRHHAMDALVIALMNPSVSRTLALRLNMRDAQRLTGVEETWKHFYGKPGEASKRFESWRESMLRGVELFNIALSDNAIPFVENIRLRVGSSVIHDATVHSFCPPKTPDGKQIITKGYGEQHSLGSAMPVELIDRAETPALWTALTRCPDFDPKKGLPENPQRTISVNGTRVGPTELVNFFEFSKSGPKACLKVRGGYVDLSGAIHHARIYRIAGKKTAYAMIRVFQVDLLRLKDHDVFTTPLKPSTISMRTAEPKIREALANGTATQIGWLVEGDELVIDTSKYSGGFIGEVLARYPEATSWRVAGFMTPAKLRIKPILLSKEGFVDETQAALLGVEVTSEAIQKTVDRPGWLPAVNVLFGAGGVRVIRRNCLGEERYHSSASLPVSMTLE

SEQ ID NO: 277 - protein, 1103 aa, Unknown
  Actinomyces sp.
MTKINDDLRYRVGIDVGLKSIGFCAVEVDENDQPLRLLNSMVFVHDAGVDPNENKAAKSRKLTAGVARRTQRGTAQNRRRLAELDRALSEELNWPLPNLEDFEDSYEPWHTRAELVEHYIKDDAERAEALAIAIRHIARHRGWRNPYLSVDSLLTPQEPSKFLRGLNERVTQALGREFPADATPGQLICAYIDSPKYAETQGIRGDSGILSGKLHQFDNVGEIRKICEVQRLDHDVFKLLVRKVFFAKSPRGSAAGLVGHDQIPGQGKYIRAEKAHPDFQLFRIVAVLTNLRIREGKAERCLTPDELRGLVDYILEVQLKQQVTWADLADNLGIERTDLRGTARASFDGSPALRFPPTDVTAEKIMASKVKWLKDWWDKADSERRGFMVDALSNSGGSTGDNDIDDEVAALLEAATEDEQAELEKIQLPQGRAAYSLDSLRRLTKRMLEEGVDLHTARKEEFNVDDDWRPEPEPIEAPVGNPAVDRVLKQVARWLNMATDRWGVPDVINIEHTRDGLGSEKVARELLRESQKRQDLNQKDMDKMIRELGISGKARRSSLIKYQAIQRQNSMCLYCGTEIGFETAEMDHIVPRALSGSTNDRSNLAAVCRACNHQKGAVPFAVWATSGEAHAGVSLEDAIKRVRLWQKGPGMSPKQHKAFQNEVISRLKSRKPDEEFDGRSMESVAWMAVELRTRIDGYYRKVNSDSVPKVGIYRGQLTAEARKASGFENRVNLIGGKGKTRFDRRHHAMDALVIAMMNQSVSQTLALRVNMRESQRITGQEETWKNFYGKPGQASERFEKWREGMLRAVELFNIELAKNAIPFHENVRLRVGSSKVHDDTVRKFIHAKLGEALSVAMIDCAETPALWTALTRLPDFDPKDGLPEDLSREIYIHSRKITADEQLNFFNSPSACLKVRGGYVEIGSSIHHARVYRIDGKKTTYSMVRVFATDLVKMTHEDVFTTPLKPSTISMRTADPKIRKALADGTATQIGWLVEGDELQLETDKYSGGLIGEVLAEYPQLTSWRVAGFYGVTQLRLRPYMLAAEGIPSDASESLRKVIEGKGWLPAINALLSSGCVKVVRRNCLGEPRFNAKSSLPVSQLLR

SEQ ID NO: 278 - protein, 1114 aa, Actinomyces turicensis
MQFHFYMVYVTMKGMNDKDASQQLRYRVGIDVGTHSIGFCAVEVDESGMPIQLLNSMVHKHDSGIDPGGNDTATTRLAEAGVARRTRRLIRRRKKRLQELDAFIEECGWPLVDLATITDARSPWRIRAHLATEHIDDEAEQGKLLSIALRHMARHRGWRSPYARISSLHIQADPSEQLKALAQRVSEKTGISLTADQTPAQLISVYLDVFETGKLRGPEGILGGKLMQSDNANELRRIATVQGLDNDLLKKIIGFVFAAESPKGSAAKRVGKDVLPGAHGLRAEKAHPAFQQFRIVSIVQNLRIKEGTGLRALTSEETEIVVDFLNQAGLTEAPTWEEVADNLEIPRSHLKGTATEGFDGIAPSTRPPFDVTSQKILNGKLKKLSAWWKDADYDHRCAMVNALSNVGSDDEGSLADDDVREFLSDFTDEELEALDKVELPGGRAAYSVDSLEKLTNTMLSEGCDLHSARKIAFGVDDSWTPPAEPIGQPVGNPAVDRVLKQVARWISAATNQWGTPESVNIEHVRDALGSEKASREYQRSLQTRRIRNEKLFAEMRERLDIGGKPRRSELTRYLALQRQNCQCLYCGMPITYTDAEMDHIVPRKGAASTNTRENFAAVCRACNHQKSNLPFAVWAEKTERPGVSVKEAYKRVSDMRIEPGMNGRQMNEFRKAIRLRLTTKHADAEIDGRSLESVAWMANELRHRIEGFYRSAENDVTVRVFRGAVTAEGRRASGFESRVNLIGGKGKTRLDRRHHAMDALTIALMEPGIAQTIALRMNMRESQRVLGEQETWKSFTGGSDTARKRWEHWCEEMLRASELFNVFLAEDRIPICQNKRLRLGSSAVHKAIVQPFEASDKRIVSDAMPVELIDRASTPALWTALTRDPDFDPKEGLPANPSRTIRLHDKRLGPNETVEFFPTAAACLAIRGGYCEIGAGIHHARIFRISGKKTTYAMLRVYQCDLVRFQKENLLTVELPANTISVRTAVPKLREALAHGTAEQIGWLVVGDELKIDLSGFTTGQIETFNETYPQATRWEVTGFPTKTQLRLKPLLIASEGLADDVPDDIVKIVKGPGWWPAIDKLLKIGNVVLYRRDTHGKPRVVSHRSLPLSSKLQ

SEQ ID NO: 279 - protein, 1113 aa, Unknown
  Alcanivorax sp.
MRYRVGLDLGTASVGAAVFSMDEQGNPMELIWHYERLFSEPLVPDMGQLKPKKAARRLARQQRRQIDRRASRLRRIAIVSRRLGIAPGRNDSGVHGNDVPTLRAMAVNERIELGQLRAVLLRMGKKRGYGGTFKAVRKVGEAGEVASGASRLEEEMVALASVQNKDSVTVGEYLAARVEHGLPSKLKVAANNEYYAPEYALFRQYLGLPAIKGRPDCLPNMYALRHQIEHEFERIWATQSQFHDVMKDHGVKEEIRNAIFFQRPLKSPADKVGRCSLQTNLPRAPRAQIAAQNFRIEKQMADLRWGMGRRAEMLNDHQKAVIRELLNQQKELSFRKIYKELERAGCPGPEGKGLNMDRAALGGRDDLSGNTTLAAWRKLGLEDRWQELDEVTQIQVINFLADLGSPEQLDTDDWSCRFMGKNGRPRNFSDEFVAFMNELRMTDGFDRLSKMGFEGGRSSYSIKALKALTEWMIAPHWRETPETHRVDEEAAIRECYPESLATPAQGGRQSKLEPPPLTGNEVVDVALRQVRHTINMMIDDLGSVPAQIVVEMAREMKGGVTRRNDIEKQNKRFASERKKAAQSIEENGKTPTPARILRYQLWIEQGHQCPYCESNISLEQALSGAYTNFEHILPRTLTQIGRKRSELVLAHRECNDEKGNRTPYQAFGHDDRRWRIVEQRANALPKKSSRKTRLLLLKDFEGEALTDESIDEFADRQLHESSWLAKVTTQWLSSLGSDVYVSRGSLTAELRRRWGLDTVIPQVRFESGMPVVDEEGAEITPEEFEKFRLQWEGHRVTREMRTDRRPDKRIDHRHHLVDAIVTALTSRSLYQQYAKAWKVADEKQRHGRVDVKVELPMPILTIRDIALEAVRSVRISHKPDRYPDGRFFEATAYGIAQRLDERSGEKVDWLVSRKSLTDLAPEKKSIDVDKVRANISRIVGEAIRLHISNIFEKRVSKGMTPQQALREPIEFQGNILRKVRCFYSKADDCVRIEHSSRRGHHYKMLLNDGFAYMEVPCKEGILYGVPNLVRPSEAVGIKRAPESGDFIRFYKGDTVKNIKTGRVYTIKQILGDGGGKLILTPVTETKPADLLSAKWGRLKVGGRNIHLLRLCAE

SEQ ID NO: 280 - protein, 1146 aa, Alicyclobacillus hesperidum
MAYRLGLDIGITSVGWAVVALEKDESGLKPVRIQDLGVRIFDKAEDSKTGASLALPRREARSARRRTRRRRHRLWRVKRLLEQHGILSMEQIEALYAQRTSSPDVYALRVAGLDRCLIAEEIARVLIHIAHRRGFQSNRKSEIKDSDAGKLLKAVQENENLMQSKGYRTVAEMLVSEATKTDAEGKLVHGKKHGYVSNVRNKAGEYRHTVSRQAIVDEVRKIFAAQRALGNDVMSEELEDSYLKILCSQRNFDDGPGGDSPYGHGSVSPDGVRQSIYERMVGSCTFETGEKRAPRSSYSFERFQLLTKVVNLRIYRQQEDGGRYPCELTQTERARVIDCAYEQTKITYGKLRKLLDMKDTESFAGLTYGLNRSRNKTEDTVFVEMKFYHEVRKALQRAGVFIQDLSIETLDQIGWILSVWKSDDNRRKKLSTLGLSDNVIEELLPLNGSKFGHLSLKAIRKILPFLEDGYSYDVACELAGYQFQGKTEYVKQRLLPPLGEGEVTNPVVRRALSQAIKVVNAVIRKHGSPESIHIELARELSKNLDERRKIEKAQKENQKNNEQIKDEIREILGSAHVTGRDIVKYKLFKQQQEFCMYSGEKLDVTRLFEPGYAEVDHIIPYGISFDDSYDNKVLVKTEQNRQKGNRTPLEYLRDKPEQKAKFIALVESIPLSQKKKNHLLMDKRAIDLEQEGFRERNLSDTRYITRALMNHIQAWLLFDETASTRSKRVVCVNGAVTAYMRARWGLTKDRDAGDKHHAADAVVVACIGDSLIQRVTKYDKFKRNALADRNRYVQQVSKSEGITQYVDKETGEVFTWESFDERKFLPNEPLEPWPFFRDELLARLSDDPSKNIRAIGLLTYSETEQIDPIFVSRMPTRKVTGAAHKETIRSPRIVKVDDNKGTEIQVVVSKVALTELKLTKDGEIKDYFRPEDDPRLYNTLRERLVQFGGDAKAAFKEPVYKISKDGSVRTPVRKVKIQEKLTLGVPVHGGRGIAENGGMVRIDVFAKGGKYYFVPIYVADVLKRELPNRLATAHKPYSEWRVVDDSYQFKFSLYPNDAVMIKPSREVDITYKDRKEPVGCRIMYFVSANIASASISLRTHDNSGELEGLGIQGLEVFEKYVVGPLGDTHPVYKERRMPFRVERKMN

SEQ ID NO: 281 - protein, 1552 aa, Unknown
  Anaerophaga sp.
MFSQRNNPYCELLQNVKQLYKEKFGKTNQVDNSIIYGFMKRILGLDLGTNSIGWALVENDENDRKGKIIGMGSRIIPMDMSELDNFNKGASISKTAERTRLRMTRRLRERHLLRRARLHRILNIMGFLPEHYRNSIDFIDKKGCFFEGQEPKIAYKPDKNSEQFCFLFTSSFHEMLEDFRKFQPELIQNRKKVPYDWTIYYLRKKALTQKISKEELAWIILNFNTKRGYYHLRGEDEDNQDNKKIKEFRALKVVNVTEREGANSSGKKWYDMELENGWVYSRQSNLPPNLEGKTIELIVSYTLDNNGNIKKDKNGKEKYSLSMPGEEDWNLVKIKTENDLKTSKKSVGEYIYDHLLKNPDQKIRGKLISTIERKFYKEELSRILKTQMNFYEELKNRELYQKCVEELYPNNKSHQQTLLQKDFIHLIVEDIIFYQRPLKSKRAFVNNCPLEYRVYVDKKSGELIKSGVKCIPKSHPLFQEFRLWQYVRNLRIYERERMVNGRLMVNVDVTNELLPDEEHIVRLFDLLNDRKSFKQDDVLRFVGIKSPKDRKRYSWNYPEDKELPGNETRHLILAWLKKVDGVPEDWLDPEKLKALWHLLYSVTDREEIIKGLHSFAKKYELPDTFVEHFKKIPRLEREYGSFSEKAIKKLLPLMRMGKYWKAEEIPADLLEKAQKIIDAEADDRISDEVREKLLHLKDISQLKGLPLWQASYLVYGRHSETGEVVKWRTSEDLEKYILQFKQHSLRNPVVEQVILEALRVVKDIWEHYGEGKEGFFNEIHVEIGRELKNPADKRKKITSQIQENENTNLRIKALLEELFNDPSVKNVRPYSPAQQEILRIYEDGVLNGQKEIPDDILKISKMARPSKSQLVKYKLWLEQKYRSPYTGEIIPLSQLFTSAYEIEHIIPQARYFDDSFSNKVICEAEVNREKGHQLAFEFITKRGGDEIELNFGKKVTILNVEEYQKFVKDHYGRSLRSLSKMRKLLMEDIPDDFIDRQLNDSRYISKVVRNLLSNIVRAEDENSLVSKHLITCTGGVTTRLKHEWGLNDVWNELITPRFVRLNKMGKEKFGEWINKKGKQVFQIQMPLELQKGFNKKRIDHRHHALDALVVACASRSHVNYLNNDSARANASETRYDLRNKLCYKDKTDSNGNYRWKFYKPWESFTEEAKNRLAGTVVSFKSNRRIMTRSSNRYFKWVDTSEGKKKKLVRQIKGDNQAIRKPLHKDTVLGKVSLRKEKKVSLSKAIDLWESIVDKPLKKRIQSLREQGYDKKLLLKYFKDRNNQFNGQDISRVNIYFFDNNLAARRVTLDASFNSEKRIDGITDSGIKKILYAHLQNEKYHGKKDEKGNEISPYELAFSPEGLEEMNANIKKLNGGKPHCPIYKVRLAETIGEKFKLGEKGNKNKKYVEAAKGTNLFFAVYVDEKGVRSFETIPFSVALERRKQKLAVVPEENENKEKLLFYLSPNDLVYVPDEDEKLIDYRQLSINPTRIYKMVSSSGTQCFFIPHFVASPIVQTMELGPNNKSERAWDGQMIKNVCYKLSVDRLGNVKIEK

SEQ ID NO: 282 - protein, 1515 aa, Anaerophaga thermohalophila
MKRILGLDLGTNSIGWALVESDEEQKSGKIQGIGSRIIPMDQNELDNFNKGNTVSQTAERTRLRMVRRLRERHLLRRERLHRVLKEIGFLPEHYLEQIDFTEKPGGFLPGKEPKIAYKPDNFKDKYDFLFQDSYHEMLSDFQDKNPEFIQKRKKVPQDWTIYYLRKKALTAKITKEELAWIILNFNQKRGYYQLRGEDEDVAKNTKKEEFHALKVVKVKEREDSEGASGKWYDIELENGWVYPRQSNIRPDWEGKILELIVTYNLDKDGNIKTDKEGNEKRSFRMPNKDDWTLRKKRTENEIEKSGKTVGEYIYDNLLDAPDLKIRGKLVSTIERKYYRSELEQILTAQKKYHPELSNSELFNKCISNLYPNNDIHRKALLSKDFVHLIINDIIFYQRPLKSKRSTVSNCPLEYRVYVDKVTGEKKKVPLKCIPKSHPLYQEFRLWQYVKNLRLFEKERFENGRLLTNVDVTEQFLPDEDKYVELFEFLNGRKTFKQDDILKFAGIKSAKDRVKYYWNYPQEKEYPGNETRYLIESRLKKIENVPDEWLNYEKIEELWHLLYSVTDKVEIEKGLQSFAAKYQLPDLFVEVFKGFPRMEREYGAFSKKAIKKLLPLMRMGKYWKLENINPDLIEKVQKIIDGEADDNINDGIRERFSEINEMSDLRGMPLWKASYLVYGRHSEAAEVIRWRTSADLDQYIKDFKQHALRNPIVEQVVLEALRVVKDVWNYFGEGREKFFDEIHVEIGRDLKNPADKRQKIANQIQENENTNLRIKALLVELFNDPEVQNVRPYSPVQQQLLKIYEDGVLNAERDIPDDIQKISRMANPTRNQLIRYKLWLEQKYRSPYTGEIIPLNKLFTSEYEVEHIIPRARYFDDSFSNKIISEAEVNRKKDRMLAFEFIKKLGGSTIDLNYGKKVSVLTVEEYQQFVKDHYGINPHSRLKMQKLLMDEIPESFIERQLNDSRYISKMVRNLLSNIVREENENSPVAKQLITCSGSITNTLKQEWGLNDVWNTIITPRFERLNKMGEQKYGEWVNKEGKPVFQIQMPLELQKGFNKKRIDHRHHALDALIVASATRSHVNYLSNEAAKTNAKDTRFDLRNRLCYKEKRGQNRNFTWRFYKPWNTFTEDAKNALNDIVVSFKSNHRVINKSTNRYFKWENLPGGMKKKRLVRQEKGDNWAIRQSLHKDTVLGKVSLRKVKPVSLSVALDSWNNIVDKALKKKIRSLKDQGYDKKLMLKYFKDRRNEYNGENISRVNVYYFDEEMAARRVDLDTSFNSEKRIEGITDSGIKKIIYAHLKNEKYHGQKDDKGKDISPYELAFSPEGIAEMNANIKQLNGGKPHCPIYKVRLAEPVGEKFQLGETGNKTEKLVEVAKGTNLFFGVYANDEGVRSFATVPFYLAVEREKQGLPAVPQENENGDQLLFWLSPNDLVYVPSEEDAHFANPKQIELDNSRIYKMVSSTGTQCFFIPHFVATPIVQTIELGPNNKSERAWDGQMIKKVCYKLSVDRLGNVEIE

SEQ ID NO: 283 - protein, 333 aa, Bacillus cereus
MMNPNNFTKEDFWRTIILYGLNQATYKIALGQSLIRFSEQQRNVVSMNELAEDFFDMYLERLKNGKPQLATPNRQTAMERIINSYNIGRLTRSQAIEKVEREAFNDVIDRFHTVDSLQVPMKFYEKTDKGIVIFDNVFEIFSDNNNFELRNELDARWDLLESAFEIKRTDSQLVNDIRKLYLANGYERTDITKNRSVLNGYQSNVCFYCGELMSDDDVHVDHVIPRQLINHDDIWNLVLSHGFCNQQKSDNLPDVNYIEKLIERNEYFIKSNHPISNKLKERLGNTPRRRRTTIDRIYEHAKLVLAPWKGIYGYNPATDPFYKTFIRNIVLSK

SEQ ID NO: 284 - protein, 1068 aa, Bacillus cereus
MRYVLGLDIGIASCGWAVINQEKERIEDLGVRIFDKAENPKDGKSLAAPRRDARSTRRTLRRKKHRMQRIKILLVKQGLLFKTELNHLYESATEFDVWNLRLDALERKLHPKEFARVLIHLAKRRGFKSNRKETTLSENGQILESISENQQIMEQQNYRTVGEMILKDKKFENHKRNKDGTYIGTVTRQQLQDEIQMIFHTQRLYKNDYATEEFESSYLEIWASQRPYASKDQIEKMIGYCTLEPKEKRTPKASWSFQYFVALQTINNLRLISKDKIEELSFEEKKQIMNLALEKPIVKYIDIRKLLSIPNDFQFNSLSYSADTVDTTLENKRCIELKEYHSINKVYKQVYGKNTPNLLPIDYDTIAYGLTIFKDDKDILEYLQNKYVNAKGKPIKNLAKKTYDDTFIQALLNLNFTKMGHLSFKALKNIIPFLEEGLSYDKACEKAGYNFKGTSYTERTKYLPVIPQNTNPVVHRALSQTRKVINAIIKKYGSPNAIHIETARELSKTFQERKEIDSRYQDNSKKNEHAIHKLKELGNINPSGINIVKFKLWSEQDGRCMYSGKYIEPHRLFEEGYTEVDHILPYSRSLDDSYNNKILTLGTENQRKGNKTPYEYMGNTSIWDEFETRVQSNKKINFKKQQKLLLQNFSYAREQEFIERNLNDTRYATIYLTSLIQQHLIFSESSSKKKVRTVSGIITSHLRSRWGFNKDRKEGHIHHALDAVIVAVTSNHMIQRVTKYYKLKELNKNLQAKQLPFPEPWEGFRLELEARISPNTQQYLKGIHFKNYADVNLSDIKPIFVSRMPKRSITGELHQETIRKFLGYNEKGKVLTAIKTKLEDIPFDANGDFPMYGKETDLYTYNAIKERYLSHEKDKRKSFQEPLYKPTKSGEIGPLIKSIKIMDTRTIVNPVNQGKGVVYNSKIARTDVFKKEDKYYLIPIYTIDLLKNILPHKAITAGKGYEDWTTIDSSFTFLFSLFPNDLIQIVPSKNKTIKARTTVSKKEILLPSLTGYFKGVHSGTAGITVETHDGSVIANVGSKQLLLFEKYQVDVLGHYTKIKEEKRMGMAI

SEQ ID NO: 285 - protein, 1078 aa, Bacillus cereus
MRYVLGLDIGIASCGWAVINQEKERIEDLGVRIFDKAENPKDGKSLAAPRRDARSTRRTLRRKKHRMQRIKVLLVKHGLLSKTELDHLYESATEVDVWNLRLDALERKLYPKEFARILIHLAKRRGFKSNRKETTLSENGQILESISENQQIMEKQNYRTVGEMILKDKKFENHKRNKNGTYVGTVTRQQLQDEIQMIFHAQRLYKNDYATEEFESSYLEIWASQRPYASKDQIEKMIGYCTLEPKEKRAPKASWSFQYFVALQTINNLRLISKDRIEELSFEEKKQIMNLALEKSIVKYIDIRKLLSVPNEFQFNSLSYSADTVDTAVESRKCIELKEYHSINKVYKQIYGENALNLLPKYYDTIAYGLTIFKDDKDILEYLQNKYVNAKGKPISNFANKTYDDTFIQALLNLNFTKMGHLSFKALKNIIPFLEEGLSYDKACEKAGYNFKGTSYTEQTKYLPVIPQNTNPVVHRALSQTRKVINAIIKKYGSPNAIHIETARELSKTFQERKEIDSMYQDNSKKNEHAIHKLKELGNINPSGINIVKFKLWNEQDGRCMYSGKYIEPHRLFEEGYTEVDHILPYSRSLDDSYNNKTLTLGTENQRKGNKIPYEYMGNTSIWNDFETRVQSNKKINKKKQQKLLLQHFSYAREQEFIERNLNDTRYATIYLSSLIQQHLIFSESSRKKKVHTVSGIITSHLRSRWGFNKDRKEGHIHHALDAVIVAVTSDHMIQRVTKYYKLKELNRNLQAKRMPFPEPWEGFRLELEARISPNTQQYLKGLRFKNYADVNLSEIKSIFVSRMPKHSITGELHQETIRKFIGYNEKGKVLTAIKTKLEDIPFDANGDFPMYGKESDLYTYNAIKERYLSHKKDKRKSFQEPLYKPTKSGGIGPLIKSIKIMDTRTIVNPVNQGKGVVYNSKIARTDVFKKEEKYYLIPIYTIDLMKNILPQKAITAGKGYEDWTTIDPSFTFLFSLFPNDLIQIVPSKNKTIKARTTVSKKEVLLPSLTGYFKGVHSGTAGITVETHDGSVIANVGSKQLLLIEKYQVDVLGNYTKIKEEKRIGLTTYNDNKKIAAC

SEQ ID NO: 286 - protein, 1088 aa, Bacillus smithii
MNYKMGLDIGIASVGWAVINLDLKRIEDLGVRIFDKAEHPQNGESLALPRRIARSARRRLRRRKHRLERIRRLLVSENVLTKEEMNLLFKQKKQIDVWQLRVDALERKLNNDELARVLLHLAKRRGFKSNRKSERNSKESSEFLKNIEENQSILAQYRSVGEMIVKDSKFAYHKRNKLDSYSNMIARDDLEREIKLIFEKQREFNNPVCTERLEEKYLNIWSSQRPFASKEDIEKKVGFCTFEPKEKRAPKATYTFQSFIVWEHINKLRLVSPDETRALTEIERNLLYKQAFSKNKMTYYDIRKLLNLSDDIHFKGLLYDPKSSLKQIENIRFLELDSYHKIRKCIENVYGKDGIRMFNETDIDTFGYALTIFKDDEDIVAYLQNEYITKNGKRVSNLANKVYDKSLIDELLNLSFSKFAHLSMKAIRNILPYMEQGEIYSKACELAGYNFTGPKKKEKALLLPVIPNIANPVVMRALTQSRKVVNAIIKKYGSPVSIHIELARDLSHSFDERKKIQKDQTENRKKNETAIKQLIEYELTKNPTGLDIVKFKLWSEQQGRCMYSLKPIELERLLEPGYVEVDHILPYSRSLDDSYANKVLVLTKENREKGNHTPVEYLGLGSERWKKFEKFVLANKQFSKKKKQNLLRLRYEETEEKEFKERNLNDTRYISKFFANFIKEHLKFADGDGGQKVYTINGKITAHLRSRWDFNKNREESDLHHAVDAVIVACATQGMIKKITEFYKAREQNKESAKKKEPIFPQPWPHFADELKARLSKFPQESIEAFALGNYDRKKLESLRPVFVSRMPKRSVTGAAHQETLRRCVGIDEQSGKIQTAVKTKLSDIKLDKDGHFPMYQKESDPRTYEAIRQRLLEHNNDPKKAFQEPLYKPKKNGEPGPVIRTVKIIDTKNKVVHLDGSKTVAYNSNIVRTDVFEKDGKYYCVPVYTMDIMKGTLPNKAIEANKPYSEWKEMTEEYTFQFSLFPNDLVRIVLPREKTIKTSTNEEIIIKDIFAYYKTIDSATGGLELISHDRNFSLRGVGSKTLKRFEKYQVDVLGNIHKVKGEKRVGLAAPTNQKKGKTVDSLQSVSD

SEQ ID NO: 287 - protein, 1069 aa, Bacillus thuringiensis
MNYDIGLRIGITSCGWSIINKDLERIEDLGVRVFEKAENPDGTASAAPRREARKSRRKHRRKKHRIERIKRLIVQHDLLSKKELDSLYLSPFNIDVWNLRVEALERKLDNREFARVLIHLVQRRGFQTIRKSVEIQEEGKLLENVSENERIMKVNGYKTVGEMFSKHEKFTHHKRNKDGSYTSVVTRSLLLKEIKTIFNSQRILGNVFSTQKLESDYLYIWGSQRPTLTYEQLMSMVGNCIYEKKEKRAPKTSWAFQYFSLLQKINKLKVSDDNTLRKLSKEERDIVIELAFKKKNVSFVDIRKALKLNDNTKFNHLTYSHVVETKKVEKATFIELKGYHLIKKQLKDRNVELTQELQPKDYDAIAAASTFFKNDIEFRDYLRNQYLDSNGKRKSNIANKVFEDKVIAAVFELNFSKVCHLSFKSLYKLIPHLEKGLDYKEAILCAGYNFRDENKRDKKLFLPVIQQETNPVVHRALTQARKVINAIIREYGSPNTIRFVVANDLAKTYKQRKELESTLKKNRAENEKIKTKLLSMGIINPTGMDIVKYKLWYEQSGICLYTGRQMELSSLFKPGYSIVNHIIPYNRSFDDTYHNRVLTLTETKYEKGNKIPFEYFGAEETCWNEYEKRVSTSKKIHDKKREKLLIRNFDIEYENEMISNNVFDTHYIGSYFEKYIDEHLQFKKSTKKQKVFSIHGNMVAHLHSRWGFNKNSREIYLNHAVDAAIVAVLTDQLIRNIADYYRRDNILEQKGSLKFPEPWKSFSIELEARISPQVRDLIKKLNLDSYLDVDILHIKPVFISKKPRRKVNGEAHKSTIRSLIGINEIGKTVTCIKTRLEDIPFDENGDFPMYGKDTDKYTYTAIKERYLEFNKDKEKAFSTPLYKLKRNGEPGNQIKSVKIIDTRNIVNKVNQGKGIAYNSNIIRVDVFSRDQKYYVVPIYLRDFIKGSLPNKIITAAKGFMQWPETDNSYTFLFSIFPNDLIKVVPKEGKFIKAKNENKENINLTEILGYFKGLDSSTGAFTLESHDGSLLARGIGTKNLLLIEKYQVDVLGRYNKVGNEERQDIKIQQN

SEQ ID NO: 288 - protein, 206 aa, Bacteroides cellulosilyticus
MKKILGLDLGCNSIGWALVNEAENTEEISSIIKLGVRVNPLTVDEMQNFEKGKSITTNADRTLKRSMRRNLQRYKLRRDTLIEVLKEHGFITDSTLLSEHGNKTTFETYRLRAKAAVEEISLEKFARVLLMINKKRGYKSSRKAKGSEDGVLIDGMDVARKLYEEGLTPGELCLQILEAGKKNLPDFYRSDLQNEFDRIWNFQKLV

SEQ ID NO: 289 - protein, 349 aa, Bacteroides coprosuis
MKKILGLDIGTNSVGWAVVNTNQEGEPSQIEKLGSRIIPMSQDILDKFGQGQTVSSTASRTDYRGIRRLRERSLLRRERLHRVLHILDFLPKHYADSIGWDPRNSKTYGKFLPGTEVKLAWVPTADGHQFLFYSTYLEMLEDLKQTQAQLFETSQTPVPLDWTIYYLRKKALTQPITKHELAWLLLHFNTKRGYYQRRGELEDTPTDKLVEYHALKVVDVEVDPEDQSKKPWYFVHLENGWIYKRQSSEPLDNWKGLVKEFIVTTHLDKEGKPKLDKEGEVRRSFSSPKEDDWTLVKKKTENDLEKSGLTVGAYIYQTLLNKPNQKIRGGLIKHIERNYYVEELEQILR

SEQ ID NO: 290 - protein, 1504 aa, Bacteroides coprosuis
MKKVLGLDIGTNSVGWAVVNQNDKGEFLSIEKIGSRIIPMSQDVMDKFGAGQTESSTAQRTQYRGVRRLRERSLLRRERLHRVLHILHFLPQHYDAAIGWNKKENKTYGKFLPGVEVNIPWVATDQGHQFIFMDSYAEMLKDLKQHQPHLFEKSSTPVPLDWTIYYLRKKALTQAISKEELAWILLNFNQKRGYYQLRGEEVEDNTKREEFYALKVVKVELDKDNTSAKTWYKVHLENGFIYPCPSDTPIDSWVGMVKDFIVTTTLEKDGSEKRTADGEIKRSFRAPKEDDWTLLKKKTESELEKSGKQVGAFIYDTLLSNPDQKIIGGLIKTIERKYYKKELEQILETQQKFIAELSDKKLFQACAEELYPLNDSHRENLLERDFKHLFVQDIIFYHRPLKTKKSLISNCTYEYRTFYKNGEKQISPIKCIAKSNPLFQEFRVWQFVQNLRILQRQRSEGDSIKYNVDVTAEFLKDENDIANLFTWLNERKVIKQDQLLKSYFKLKVNKETKELDYRWNYVDDKNKEYPCNATRTHILSFLEKCKEEKRIEDDRFVYSLWHLLYSVVEPIELRGALAKFAEREHLHPSFVDVFAQFPPLEKEYGSYSEKAIKRLLPLMRMGDYWHEDKIDVKTKQRIQRIIDGEADDDITHRSREKVENLRSITDFKGLPLWKAGYVVYNRHSESGELTKWKTPHELSNYIQNEFKQYSLRNPIVEQIVLETLRVVHDLWVKHGDFSEIHLELGRDIKNSSDKRKRMAERQQENENSRQRVLEMLIDLKKEAAFADLNPYSPSQQEKLRIVEDGVLRSNIEIPKDIEKITKSAKPTSRELTKYRLWLDQKYRSPYTGQPISLAQLFTSKYEIEHVIPQAKYFDDSFTNKVICESEVNKEKGSMLAHEFILKNGGSTVNVGGRQVQVLKNDAYVELINRLYGKNNPVKAKKLLAEDIDEVVGDFSERQLNDTRYISRVVQKLLSNIVREEDEQESTSKHVIGCSGQVTTALKKDWGLNDIWNKIIQPRFERLNEMTATEDYGVWQSPNHFQIRVPEEIQKGFTKKRIDHRHHAMDALVIACATRSHINYISNRSGQDRNAKFETTRTDLRSKLCYKENSSGNNYNYIFNKPWDTFTQDAHRALENIVVSHKQNLRVLTKTNNYTQFINKDGKKDLQKQVKGDHFAVRKPMHQETIYGRVSIRSIKEVALKKALENWKQIVDRTLKDKIRELIGAYGKYDAQTILKYFKDRDYKFNNLKINRVEVYEYDHNCAAVRKSIGDDLTIKQIERITDESIRKILMNHLSNYDDNLKEAFSPEGLMEMNKNIKELNGGKNHQPIYKVRLFEDLGSKFPLGVSHNNPDKYAIAAKGTNLFFGIYEDQEGKRMFDSIPLNIVIDRLKEKKSPVPETYNESKLKFHLSPNDLVYVPTDEEQKQPELVDVDHLSDEQKGRVYKAVSFTGNRAFFVNHRVSKVIHDYVEFGTKNKIENDDDKRSLKHICWKLKVNRLGEITDVKR

SEQ ID NO: 291 - protein, 1509 aa, Bacteroides eggerthii
MKTILGLDLGTNSVGWAVINSVIKEQAERIWIEMAGSRIIPMDAAVLGDFDKGNSISQTSERTRLRGARRLRERQLLRRERLHKVLNILGFLPNHYLEYIDFEKHPGKFLADAEPKLAWVKDEQGKYTFLFQAAFDEMLADFAIHQPSLVSGDKKIPYDWTIYYLRKKALTEMISKEELAWILLNFNQKRGYYQLRGEEEEDNAGKSVEFYALKVLTVEATDEKKGRDVWYNVHLENGWIYRRSSSVPLDWEGQVKEFIVTTDLNPDGTPKLDKYGEVKRSFRAPKEDDWMLIKKRTEADIANTHKTVGAYIYDTLLQKPQQKIIGKLVKTVERKLYRDELSLILQKQCAFHAELQDRALYARCVEALYPSNEVRRKNIANRDFVYLLMDDILFYQRPLKTKKSLIANCPYEENEYVDRETGEIKKTPLKCIAKSHPLFQEFRLWNFLSNIRIYQKEKEINGTLHLDVDVTAEFLKTEDDYVALFDWLNSRKEIEQKTFLKYPKFGLKKEISNYRWNYVEDKQYPCNETRHAILSSLEKANVCIDFLSNEKEVALWHILYSVSDKQEIEKALRTFAAKNGLDESFVEAFKKFPPFKSEYGAYSAKAIKKMLPLMRCGKYWDVSSIDDTTKERIKKIVTGEYDERISVKVRDKVMNLSDISCFRRLPLWLACYIVYNRHSEDKEAVKWESPADIDAYLASFKQHSLRNPIVEQVITETLRVVRDIWKQVGRIDEIHIELGREMKNPADKRKRMTAQILENENANLRIKALLAEFMNPEYEIENVRPYSPSQQEILRIYEDTVLHAEDQLPEEIDAILKKFNSSKVPTKSEFLRYKLWLEQKYRSPYTGELIPLGKLFTAAYEIEHVIPQSRYFDDSFSNKVICESAVNKLKDNQLGYEFIKNHHGQKVEVGFGKSVEIFSVDSYERFVKEQYAKSAVKMKKLLMDDIPEQFIERQLNDSRYISKVIKGLLSNIVREKNDSGEYEPEAVSKNIVVCTGSVTDRLKRDWGMNDVWNSIVYPRFERLNSLTDTQSFGHWENKSGKKVFQTELPLEYQKGFSKKRIDHRHHAMDAIVIACATRNHVNYLSNESASRNAKISRYDLQRLLCDKNRTDDNGNYKWVIKKPWDTFTQDAREVLSKIVVSLKQNLRIINKTTNVYRHLDATGNRVYEKQKTGDSWAIRKPMHKDTVFGAVNLRKVKVVRLSVALDTPAMIVDKRVKNKVFELLSYKYDKKRIEKYFKENAFLWKELDLAKVAVYYFTEATTEPLVAVRKPLDSTFNEKKIKESVTDTGIQKILLNHLCTKEGKPDLAFSAEGIEEMNRNLLQLNNGKSHQPIYKVRVYEPRGNKFSVGVLGNKGTKWVEAAKGTNLFFAIYITEDGKRTYETIPLNVVIEREKQGLVPVPDRNKKGDKLLFWLSPNDLVYLPTEEEREFGRINEPIDRGRIYKMVSCTGNEGHFIPANVANPIVPVIELGSNNKAQRAWTNEMIKDICIPIKVDRLGHIIEVKYRIDE

SEQ ID NO: 292 - protein, 1526 aa, Bacteroides faecis
MKKILGLDLGTNSIGWAVLNAADDNSLKYIEAAGSRIIPMDAAILGDFDRGNSISQTAERTRIRGMRHLRERYLLRRARLHRILNLLGFLPFHYAQDIDRYGNFSADMEPKIAWCKNLEGELEFIFIESFNEMLEDFRKNQPELVADNKKVPYDWVIYYLRKKALEKKISKEELAWILLNFNQKRGYYQLRGEDDDESMKTAKTRQYFDKQIIKNIIDTNQTYKGQRILIVELQNGDKGKIFKKEIPDWIGQEKNIIVTVDIDKDGNDKYEESGSLSCRFKIPTDAEWESEWKLIKMKTQKDLDESNKTVGTYIYDSILQNPTQKVRGKLVRTIERKYYKAELKQILEKQTEFHSELQDKDLYIECLNELYSNNDTHRNAITDRDFVYLFMNDILFYQRPLKSKKSLIDNCPYERNIYIDKETGEIKYSPIKCIAKSHPLFQEFRLWKFISSIRIYQRESVVEVVDKQLDLFSSQSTSVQKLVTDVDVTDKFLTCENDYVALFEWLNKKKIIDQKEFLKYRPFGLKGDIDNYRWNYVEDKSYPCNETHAMILTYFAKAGISEDILTKEMEEALWHILYSVEDRQEITKALRTFASKYHLSDSFVKVFSNIPPFKKEYGSYSAKAIKKLLSLMRMGKYWSEDAIDVNTRERIDKIVTGEYDEKIRDRVREKTIRLNDIRHFRALPDWLACYVVYDRHSETREITEWKSPEEIDEYIRNFKQHSLRNPIVEQVITETLRTVRDIWKQVGCIDEIHVELGREMKNPADKRKRITSQIIENENANLRVKALLTEFVNSEFEIENVRPYSLSQQDILRIYEDGVLNSVAEVPGDIAGILKKFNENDAKKRPTTSEILRYKLWLEQKYRSPYTGEMIPLSKLFTSAYEIEHVIPQSRYFDDSFSNKVICEAEVNKLKDNALGYEFIKKHHGEKVELGFGKIVEIFSVSVYEQFVKDNYSRNRGKMKKLLMDEIPEQFIERQLNDSRYISKVVKTLLSNVVREKAEQEAVSKNVIVCTGGVTDRLKKDWGINDVWNKIVLPRFLRLNELTNSTNFTAKNAAGNEIPAMPLELQKGFNKKRIDHRHHAMDAIVIACANRNIVNYLNNESASRKAKISRHDLQAILCDKVRTDDKGNYQWRVKKPWDTFTQDVYVALENIIVSFKQNLRVINKTSNYYWHYENGKKVLVKQVKGDSWAIRKPMHKDTVFGEVNLRKVKSVSLNEALKNPQFIVEKDLKRQLLSLLQQNFDIKKIKKYFEEHKDIWSDISLSKMNIYYFTKETKDRYFATRKPLDASFDKKKIESCITDTGIQQILLRHLELKENDPERAFSPDGIDEMNRNIIQLNKGKGHHPIAKVRVYEKADKFEVGQRGNKSSKFVEAAKGTNLFFAVYETEYPDEKTNSIVRKRNYATIPLNIAIERQKRGLSTAPEDEKGNVPSFVLSPNDLVYLPTSEDIVNGHITQPIDKSRIYKMVSSSGSQCFFIKHNIANIIVDKYEFSPLNKMERAISNEMIKEICIPVKVDRLGNIVKLGKSE

SEQ ID NO: 293 - protein, 1509 aa, Bacteroides fluxus
MKTILGLDLGTNSVGWAVINSVIKEQAERIWIEMAGSRIIPMDAAVLGDFDKGNSISQTSERTRLRGVRRLRERQLLRRERLHKVLNILGFLPNHYLEYIDFEKHPGKFLSDAEPKLPWVKDEQGKYTFLFQAAFDEMLADFAIHQPSLVSGDKKIPYDWTIYYLRKKALTEMISKEELAWILLNFNQKRGYYQLRGEEEEDNAGKSVEFYALKVLTVEATDEKKGRDVWYNVHLENGWIYRRSSSVPLDWEGQIKEFIVTTDLNPDSTPKLDKYGEVKRSFRAPKEDDWMLIKKRTEADIANTHKTVGAYIYDTLLQKPQQKIIGKLVKTVERKLYRDELSLILQKQCAFHAELQDRTLYARCVEALYPNNEVQRRNIANRDFVYLLMDDVLFYQRPLKTKKSLIANCPYEENEYVDRETGEIKKAPLKCIAKSHPLFQEFRLWNFLSNIRIYQKEKEINGTLHLDVDVTAEFLKTEDDYVALFDWLNSRKEIEQKTFLKYPKFGLKKEISNYRWNYVEDKQYPCNETRHAILSRLEKANVCIDFLSNEKEVALWHILYSVSDKQEIEKALRTFAAKNGLDESFVEAFKKFPPFKSEYGAYSAKAIKKLLPLMRCGKYWDVSSIDDTTKERIKKIVAGEYDERIAVKVRDKVMNLSDISCFKRLPLWLACYIVYNRHSEDKEAVKWESPADIDAYLASFKQHSLRNPIVEQVITETLRVVRDIWKQVGRIDEIHIELGREMKNPADKRKRMTAQILENENANLRIKALLAEFMNPEYEIENVRPYSPSQQEILRIYEDMVLHAEDQLPEEIDAILKKFNSSKVPTKSEFLRYKLWLEQKYRSPYTGELIPLGKLFTAAYEIEHVIPQSRYFDDSFSNKVICESAVNKLKDNQLGYEFIKNHHGQKVEVGFGKSVEIFSVDSYERFVKEQYAKSAVKMKKMLMDDIPEQFIERQLNDSRYISKVIKGLLSNIVREKNDSGEYEPEAVSKNIVVCTGSVTDRLKRDWGMNDVWNSIVYPRFERLNSLTDTQSFGHWENKSGKKVFQTELPLEYQKGFSKKRIDHRHHAMDAIVIACATRNHVNYLSNESASRNAKISRYDLQRLLCDKSRTDDNGNYKWVIKKPWDTFTQDAREVLSKIVVSLKQNLRIINKTTNVYRHLDATGNRVYEKQKTGDSWAIRKPMHKDTVFGAVNLRKVKVVRLSVALDAPTMIVDKRVKNKVFELLSYKYDKKRIEKYFKENAVLWKELDLARVAVYYFTEATTEPLVAVRKPLDSTFNEKKIKESVTDTGIQKILLNHLCTKEGKPDLAFSAEGIEEMNRNLLQLNNGKRHQPIYKVRVYEPRGNKFSVGVLGNKGTKWVEAAKGTNLFFAIYITEDGKRTYETIPLNMVIEREKQGLAPVPDKNEKGDKLLFWLSPNDLVYLPTEEELEFGRINEPIDRGRIYKMVSSSGNQCFFIPQSISNAIIPTKELGANNKAERSWDGAMIKNICIPVKVDRLGRIIEVKYRINE

SEQ ID NO: 294 - protein, 1436 aa, Bacteroides fragilis; identical to SEQ ID NO: 160

SEQ ID NO: 295 - protein, 1512 aa, Bacteroides nordii
MKNILGLDLGTNSIGWAVINSEEDGPIVKKRIELAGSRIIPMDAAVLGNFDSGVTKSQTAERTSFRSIRRLRERQLLRRERLHKVLQILGFLPEHYVNDIDFENHPGKIKRNTEPKLPWRKNSMGQFEFIFQDSFEAMLTDFATHQPVFVSEGKKVPYDWTLYYLRKKALTEGISKEELAWLILNFNQKRGYYQLRGEEEEEQSNKLVEFYALRVVKVEATDDKKGKDTWYNVHLENGWIYRRTSNIPLDWEGKVKEFIVTTDLNEDGTPKLDKYGEVKRSFRAPKEDDWTLIKKKTESDIANSHKTVGCYIYDALLQNPHQKIKGRLVRTVERKFYKEELRLILEKQLSFHPELQDRDLYRACIDALYVSNEAHKNNISGRDFVYLFIDDIIFYQRPLKTKKSLIDNCPYEENQYMDRETGEVKQAPIKCIAKSHPLFQEFRLWQFISNIRIYQRERVLDDGKLETDVDVTPDFLKTEDDYTTLFEWFNDRKEVDQKAFLKNPQFGLKKTFTEYRWNYVEDKSYPCNETRNAILNGLQKAGVSADFLSREVEEALWHILYSVEDKIEIESALRKFASKHDLDDRFADVFKKLPPFKKEYGAYSAKAIKKLLPLMRIGKYWELSNIDDKTKERIDKIITGEWDENIHDRVREKAIKLSDITDFKGLPLWLSCYVVYNRHSEARAIAKWESPEDIDSYLRLFRQHSLRNPIVEQVITETLRTVRDIWKRVGQIDEIHVELGREIKNPADKRAKMTAQIVENENTNLRIKALLAEFINSEYEIENVRPYSSNQQEKLKIYEDTVLNGVKEIPEDINTILKKFRESDLKKRPTKSDFLHYKLWLEQKYCSPYTGRIIPLGKLFTSAYEIEHIIPQAHYFDDSFSNKVICEAEVNGLKDKKLGYEFIKHNPGKMVEIGFGKPPVRIFSVEEYERFVKENYSGIKNKMNKLLMDDIPETFIERQLNDSRYISKVVKSLLSNIVREKDSNGEYEPEAISKNVIVCTGSVTDRLKRDWGVNDVWNSIIYPRFERLNELTGSQQFGCWENKEGKRVFQTAVPLEMQKGFSKKRIDHRHHAMDAIVIACATRNHINYLSNESASKKAKISRTDLQRLLCTKCRTDDNGNYKWIVKKPWPAFTQDIRKALENITVSFKQNLRVINKTTNYYVHFDESGKKVLEKQINGDSWAIRKPMHKDTVFGKVNLQKVKEVRLSLALDTPKMIVDKKLKEKVLQLYSYKYDKKRIDKYFKENASLWKDLNLSKVAVYYFTNDSTEPLVAVRKPLDTSFNAKKIKESVTDTGIQKILLNHLSNNQDDPNLAFSPDGIDKMNKNLTALNDGKYHQPIYKVRVCEPQGNKFSVGTSGNKTSKYVEAAKGTNLFFAVYQTEDGKRSYETIPLNVVIEREKLGWTPVPENNNNGDKLLFWLSPNDLVYVPTADELNNGMRLDNMDKGRIYKMISCSGPQCFFIPQNVSNAIIPVIELGANNKAEKSWNNEMIKVVCVPIRVDRLGCITQINNQK

SEQ ID NO: 296 - protein, 779 aa, Bacteroides oleiciplenus
MKEGNQYDVACEYAGYRHSKSSLTREEIDNKVLKNRLEILPKNSLRNPVVEKILNQMVNVVNAVIDTYGKPDEIRVELARELKKGAKEREELAKSIAQNTREHEAIRQLLQTEFGMMHVTRNDIIRYKLYEELKDNGYKTLYSDQYIPREKVFSKEIDIEHIIPQARLFDDSLSNKTLEYRAVNIEKGNKTAYDFVKEKYGNDGLRRYLNHCEALFKDKKTKLKKLKMEDQDIPDGFIDRDLRNTQYIAKKALSMLSEISRRVVATTGSITDELRKDWQLVDIMKELNLPKYEALGFVETFKDKDGRIIKKIKDWSKRNDHRHHAMDALTVAFTKDVFIQYFNNKNAFWMSGSKEHANITAIKNKYFEKGKALAPIPLELFRTEAKHHLENILVSIKAKNKVVTNNINRTKKKNGENLKLQQTPRGQLHLESIYGSYRQCIIRDEKVNASFDASKIANVSKSAYRNALLKRLEAYDNDPKKAFTGKNSLDKNPVYLDENKMEKVPDRVKIVEFETVYTIRKPIDPKLSIDKVVDARIRTLLKKRLEEYGGDAQRAFSNIEENPIWLNKEKGISVKRVAIRGISNAQALHDKKDKDGNPILDKEGKGIPTDFVNTSNNHHVAIYRKPVVDKMGQVILDENGSPRYELGEDVISFFEAVARVNLRQPVVDKDYKRSEGWQFLFSMKQNEYFVFPNEKTGFNPKEIDLLNPENYALISPNLFRVQKIGLNDYTFRHHLETSIQNNSNELKFITWIRCGKNGINGVIKVRVNHIGQIVSMGEY

SEQ ID NO: 297 - protein, 653 aa, Bacteroides oleiciplenus
MKKILGLDLGSSSIGWALVNEGANDEEKSSIIKLGVRVNPLTVDEAQNFEKGKSITTNADRTLKRGMRRNLQRYKQRREALVEVLKKHEFITAGTLMSEQGNKTTFETYRLRAKAVEEEISLEEFARVLLMINKKRGYKSSRKAKGDEDGVLIDGMDVAKKLYDEDLNPGELCLQLLEAGKKTLPDFYRSDLQDEFDKIWNFQKQFNPESFCDTAKEEVRGKNRTQTWTILSKYFVWTEGDSVWNNEEARTEERIKEYKLVGIKRTTKGYEQKLENYRWRVQALSEQLNPEIIAIVLQEINGQISASSGYLGAISDRSKELFFNHQTVGQSLMSELDKNPNGSLRNKVFYRQDYLDEFNTIWEKQSLYHKELTVELKKEIRDIIIFYQRRLKSQKGLISTCEFEQREIIVEKDGKRKTKIIGCKVIPRSHPLFQEFKIWQTLNDVEVYVADRRTKRKQDRKSTTLFSDTEDILLVEGKRYLYQEEKELLAKELFVRENMKKAEVLKLLFEDPKELDLNFKQIDGNRTGFALFSAYSKMIEKYGYESVNFKNSADEIIEKLQIIFADLGWNTELFSIDLSKDDKELEKQPYFRLWHLLYSFEGDNTPTGNGKLIEALMRLCSVEKEYASVLANVSFQEDYGSLSAKAIKKYYLI

SEQ ID NO: 298 - protein, 1436 aa, Unknown
  Bacteroides sp.
MKRILGLDLGTNSIGWALVDEAENKDERSSIVKLGVRVNPLTVDELTNFEKGKSITTNADRTLKRGMRRNLQRYKLRRETLMEVLKEHKLITEDTILSENGNRTTFETYRLRAKAATEKISLEEFARVLLMINKKRGYKSCRKAKGAEEGTLIDGMDIARELYNNNLTPGELCLQLLDAGKKYLPDFYRSDLQNELDRIWEKQKEYYPEILTEVLKEELRGKKRDAVWAICAKSFVWEEYYTEWNKEKGKTEQQEREHKLEGIYSKRKRDEAKRENLQWRVNGLKEKLSLEQLVIVLQEMNIQINNSSGYLGAISDRSKELYFNKQTVGQYQMEMLDKNPNASLRNMVFYRQDYLDEFNTLWEKQAEYHKELTGELKKEIRDIVIFYQRRLKSQKGLVGFCEFESRQIEVEIDGKKKIKTVGNRVIPRSSPLFQEFKIWQILNNIEVTVVGKKGKRRKQKDNSPTLFDGLDDTEQLELNGSRYLYQEEKELLAQELFVRDKMTKSDVLKLLFDNPQELDLNFKTIDGNKTGYTLFQAYSKMIEMSGHEPVDFKKTVEKVVEHVKAVFDLLNWNTDILGFNSNEELDNQSYYKLWHLLYSFEGDNTPTGNARLVQKITELYGFEKEYAIILANVTFQDDYGSLSAKAIHKILPHLKEGNRYDVACAYAGYKHSESSLTKEEIANKALKDRLTLLPKNNLRNPVVEKILNQMVNVINAIIDTYGKPDEIRVELARELKKNAKEREELTKFIAETTRKHEEFKILLQSEFGLTNVSRTDILRYKLYKELESCGYKTLYSNTYIPREKLFSKEFDIEHIIPQARLFDDSFSNKTLEARSINLEKGNKTAYDFVKEKFGESGADNSLDHYLNNIEDLFKSGKISKTKYNKLKMAEQDIPDGFINRDLRNTQYIAKKALSMLNEISRRVVATSGTITDKLRQDWQLVDVMKELNWEKYKALGLVEYFEDKDGRQIGRIKDWTKRNDHRHHAMDALTVAFTKDIFIQYFNNKNASLNSNTNEYAIKNKYFQNGRAIAPIPLREFRVEAKKHLENTLISIKAKNKVVTGNINKTKKRGGVNKYLQQTPRGQLHLETIYGSGKQYLTKEEKVNASFDMKKIATVSKSAYRDVLLKRLHENDNDPKKAFTGKNSLDKQPIWLDKEQTRKVPEKVKTVTLETIYTVRKEISPDLKVDKVIDAGVRKILTGRLNEYGNDAKKAFSNLDENPIWLNKEKGISIKRVTISGISNAQSLHVKKDKDGKPILDEDSRNIPVDFVNTGNNHHVAVYRRPVIDKRGQLVIDEAGNPKYELEEVVVSFFEAVTRANLGQPIIDKDYKTSEGWQFLFSMKQNEYFVFPNEKTGFNPKEIDLLDAENYGVISPNLFRVQKFAHKNYVFRHHLETTIKDTSSILKGITWIDFRSSKGLDAIVKVRVNHIGQIVSVGEY

SEQ ID NO: 299 - protein, 1510 aa, Unknown
  Bacteroides sp.
MKRILGLDLGTNSIGWALVDSEEQRILGMGSRIIPMDQGVLDTFSGGNPVETQTAARTAYRGTRRLRERALLRRERLIRVLNMMKFLPEHYASQIDFEKRLGQFFDEKEPKLAWKQNDEGRFEFIFQQSFNEMIEEFKNKGVVREDKKIPYDWTIYYLRKKALSQEIEKEELAWILLNFNQKRGYYQLRGEEEEENPNKLVEYYSLKIVDVIADEKPNSKGDIWYSLHLENGWIYRRSSKIPLFGWKDKTRDFIVTTDLNDDGTVKKDKEGIEKRSFRAPSENDWVLLKKKTESDIEKSHKTVGAYVYETLLQNPMQKVRGKLVRTIERKFYKDELKQILEKQREFHPELRDEDLYNDCVRELYRSNETYQFILSKRDFVHLFLDDILFYQRPLRSQKSAIGDCILEFKTYKDKDGNNIKEYLKVISKSNPLYQEFRIWQWLYNLKIYRKEDDEDVTLQFIANIEDKEQLFDFLSNRKSIEQKPLLEYLIKAKGLKKQVKTEAYRWNYVEDKIYPCSETKTMISTRLAKVENIPDNFFTKEIEQKLWHIIYSVTDKNEFEKALRTFAKKYDLDIASFVDNFKKIPPFKNEYGSFSEKAIKKLLPLMRLGKYWKWNDIDNNTQNRISKIITGEYDEEIKDIVREKSIALTNENDFQGLQLWLAQYLVYGRHSEADIAGKWHSVADLEKYLNEFKQHSLRNPIVEQIITETLRVVRDIWRKYGQGAENFFSEIHVELGRDMKNTADERKKIVNVVTENENTNLRIKALLMELKNNSDGKLEVENVRPYSPTQQDILKIYEEYAISTGLDNEKDEKVKEDIKKISRVAQPTTTELQRYKLWLEQKYCSPYTGKVIPLGKLFTEEYQIEHIIPKSRYYDDSFSNKVICEAAVNKLKDKCLGLEFIKNYHGQIVETGFGQKVTIFDEEAYQNFVKQHYAYNRSKRTKLLLEEIPEKMIERQMNDTRYISKFVLPLLSNLVRAEENDNGVNSKNVLPVNGKITTMLKQDWGLNDVWNDLILPRFVRMNELAKTIAFTSWNEQHQKYLPTVPLELSKGFQKKRIDHRHHAMDALVIACATRDHVNLLNNKHANTDTIRYDLQRKLRLFERVTYIDPQTKNNVTKDIPKEFKKPWDNFTVDARNELEKIIVSFKQNLRIINKATNIYTKYENGKKIKVGQKGLNWAIRKPLHKETVFAKVSLRKRKTVRLSEALKDWKKIVDKKLKQEIKRLTCQYGKFDVDTILRYFKDRKYQFGEVDVSKVKMYYFDEENAAVRKNVDTSFTEKFIQGSVTDTGIQKILLNHLEAKGNKVEIAFSPEGIEEMNKNIIQLNEGKLHLPIFKVRVYETIGNKFSVGVKGNKKDKYVEAAKGTNLFFAIYVDENGIRSYETIPLNIVIERLKQGLSVVPEKNRKEHSLLFYLSPNDLVYVPIEDERENIHAVNLDQLNNEQRKRIYKMVSCTGSECHFVPYYVASPIVNKVEYSSLNKIGRSLTGEMIKDVCIKLKVDRLGNVKGISGL

SEQ ID NO: 300 - protein, 1436 aa, Unknown
  Bacteroides sp.
MKRILGLDLGTNSIGWALVNEAENKDERSSIVKLGVRVNPLTVDELTNFEKGKSITTNADRTLKRGMRRNLQRYKLRRETLTEVLKEHKLITEDTILSENGNRTTFETYRLRAKAVTEEISLEEFARVLLMINKKRGYKSSRKAKGVEEGTLIDGMDIARELYNNNLTPGELCLQLLDAGKKFLPDFYRSDLQNELDRIWEKQKEYYPEILTDVLKEELRGKKRDAVWAICAKYFVWKETYTEWNKEKGKTEQQEREHKLEGIYSKRKRDEAKRENLQWRVNGLKEKLSLEQLVIVFQEMNTQINNSSGYLGAISDRSKELYFNKQTVGQYQMEMLDKNPNASLRNMVFYRQDYLDEFNMLWEKQAVYHKELTEELKKEIRDIIIFYQRRLKSQKGLIGFCEFESRQIEVDIDGKKKIKTVGNRVISRSSPLFQEFKIWQILNNIEVTVVGKKRKRRKLKENYSAIFEELNDAEQLELNGSRRLCQEEKELLAQELFVRDKMTKSEVLKLLFDNPQELDLNFKTIDGNKTGYALFQAYSKMIEMSGHEPVDFKKPVEKVVEYIKAVFDLLNWNTDILGFNSNEELDNQSYYKLWHLLYSFEGDNTPTGNGRLIQKMTELYGFEKEYATILANVSFQDDYGSLSAKAIHKILPHLKEGNRYDVACVYAGYRHSESSLTREEIANKVLKDRLMLLPKNSLHNPVVEKILNQMVNVINVIIDIYGKPDEIRVELARELKKNAKEREELTKSIAQTTKANEEYKTLLQTEFGLTNVSRTDILRYKLYKELESCGYKTLYSNTYISREKLFSKEFDIEHIIPQARLFDDSFSNKTLEARSVNIEKGNKTAYDFVKEKFGESGADNSLEHYLNNIEDLFKSGKISKTKYNKLKMAEQDIPDGFIERDLRNTQYIAKKALSMLNEISHRVVATSGSVTDKLREDWQLIDVMKELNWEKYKALGLVEYFEDRDGRQIGRIKDWTKRNDHRHHAMDALTVAFTKDVFIQYFNNKNASLDPNANEHAIKNKYFQNGRAIAPMPLREFRAEAKKHLENTLISIKAKNKVITGNINKTRKKGGVNKNMQQTPRGQLHLETIYGSGKQYLTKEEKVNASFDMRKIETVSKSAYRDALLKRLYENDNDPKKAFAGKNSLDKQPIWLDKEQMRKVPEKVKIVTLEAIYTIRKEISPDLKVDKVIDVGVRKILIDRLNEYGNDAKKAFSNLDKNPIWLNKEKGISIKRVTISGISNAQSLHVKKDKDGKPILDENGRNIPVDFVNTGNNHHVAVYYRPVIDKRGQLVVDEAGNPKYELEEVVVSFFEAVTRANLGLPIIDKDYKTTEGWQFLFSMKQNEYFVFPNEKIGFNPKEIDLLDVENYGLISPNLFRVQKFSLKNYVFRHHLETTIKDTSSILRGITWIDFRSSKGLDTIVKVRVNHIGQIVSVGEY

SEQ ID NO: 301 - protein, 1424 aa, Unknown
  Bacteroides sp.
MKRILGLDLGTNSIGWALVNEAETDEEVSSIIRLGVRVNPLTVDETQNFEKGKSITTNAERTLKRSMRRNLQRYKLRRDALVEFLKELGFITDETILSEQGNRTTFETCRLRAKAAEEEISLEELSRVLLMINKKRGYKSSRKVKKEEDGVLIDGMEIAKKLYEEDLTPGQLCSQLLESGKKVLPDFYHSDLQEELDRIWSVQKQFHPDVFCDAAKEEIKGKNRSQTWAILANYFVWKEEVVGWNDREAKNETIEKECKLVGLKRTTKGYELKKENYRWRAQALTEQLGLEEIAVVLQEINGQINASSGYLGAISDRSKVLYFNHQTVGQYQMAELDKNPHASLRNMVFYRQDYLDEFDRIWEKQAEFHKELTAELKKEIRDMIIFYQRRLKSQKGLISFCEFERLEIVVEKDGKKQTKVIGCKVIPRSHPLFQEFKVWQTLNDIKVLGREKKRNALSASESRALYPEEKEILARELAIKENMKKADVLKLLFENPQELDLNFKQIDGNRTGFSLFSAYSKMIEKYGYEPLDFKKPADEIIGQLRTIFTDLGWNTNLFTIDLTKEGKELEMQPYFRLWHLLYSFEGDNTSTGNGKLIEKIMQLCGVEKEYAVELASLSFQDDYGSLSAKAIKRILPYLKEGNLYDVACEYAGYRHSKSSLTKEEIENKVLKGKLEVLPKNSLRNPVVEKILSQMVNVINTIIDTYGKPDEIRVELARELKKSAKEREELTKAIAKSTREHEEIRKLLQDEFGMMNVSRNDIIRYKLYEELKDNGYKTLYSNQYIPKEKIFSKEIDIEHIIPQSRLFDDSLSNKTLEYKAINIEKGNKTAYDFVKEKYGEEGLQQYINRCESLFNDKKAKLRKLKMEQKDIPDGFIDRDLRNTQYIAKKALAMLNEICRRVVATTGSITDQLREDWQLVDVMKELNLPKYEALGFVETYEDKDGRKIKRIKDWTKRNDHRHHAMDALTVAFTKDAFIQYFNNKNAAQDSGNRNHTNIIGIKTRYFDKGRALPPIPLEQFRIEAKQHLEKLLVSIKAKNKVVTVNVNRTKKRKGENTKIQQTPRGQLHLETVYGSHKQYVTKIEKVNASFDAAKIATVSKRAYRNALLKRLETFGNDPKKAFTGKNALEKNPLYADKYQTIRVPEKVQTVEFETIYTIRKPVDPALNVDKVVDVKVRAILERRLKEYGGDPKKAFVNFWENPIWLNKEKGISIKRVSIRGINNAQSIHVKKDKNGNPIWDENGKQIPVDFVNTGNNHHVAIYRKPVLDKKGQVTFDEDGNLMYELDEVVVPFFEAVTRANLGLPIIDKDYRKSEGWQFLFSMKQNEYFVFPNEKTGFNPKEVDLLNPDNYAMISPNLFRVQTMSKVMYGNNVVRDYKFRHHLETTVKDMKELKDIAYKQYKTLSFGNSVVKIRINHIGQIVSVGEY

SEQ ID NO: 302 - protein, 1055 aa, Unknown
  Bacteroides sp.
MRIYRKDLAQDVDVTNELLKTEEDYVALFDWLNGKKEIDQKAFLKYPLFGLKKEVENYRWNYVQDKPYPCNETRSSMLARLEKCDISIEFLTKENEEALWHILYSVEDKNEIVKALQKFADKHDLNASFVDVFQKFPPFKKEYGSYSAKAIKKLLPLMRMGKYWSENSIDKGTRERMDKIITGEYDEKIENRVREKAIHLADVSDFKGLPLWLVCYIVYGRHSEAKEITQWKSPADIDLYLRSFKQHSLRNPIVEQIIIETLRVVRDIWKQVGNIDEIHVELGREMKNPADKRKKMTQQMSENENTNLRIKYLLTEFLNPEYEVENVRPYSPSQQDILRIYEEGVLNSVSDLPEEISDILKKFTETDLKKRPSRSEVLRYKLWLEQKYRSPYTGEVIPLGKLFTPAYEIEHVIPQSCYFDDSFSNKVICEAEVNKLKSNLLGHEFIVKHHGEIVELPFGKKVRIFTVDEYEQFVKDNYSRTRSKMKKLLMDDIPEEFVARQLNDSRYISKVVKSLLSNIVREKGEEEAISKNVIPCTGGVTDRLKKDWGINEVWNKIILPRFQRLNELTGTNKFTTKNVGIQEIPTMPLELQKGFNKKRIDHRHHAMDAIIIACANRNIINYLNNESATAKAELSRYDLQKMLCDKAKTDNNGNYKWVIRKPWASFTQDTYLALENIIVSFKQNLRVINKATNHFLHYNEEGKKIFVKQGKGDNWAIRKSMHKDTVFGEVNLRRIKTVALNEAMKNPQSIVVKDFKRKLLELWNLGFDAKRIKKYFEDNRETWSDINLSKIEVYYFSKDTKDRFFATRKPLDTSFDRKKIENNITDTGIQKILLRHLELKDNNPDIAFSPDGIDEMNRNIIQLNNGKYHQPIIKVRWYEQADKFAVGQTGNKSSKFVEAAKGTNLFFAVYESNILDKKTNTIIKKRNYATIPLNVAIERQKQGLPVAPEDENGNDPIFVLSPNDLVYLPTAADLANGIIAQPLDRGRIYKMVSCTGNEGYFIPARIANPILQTIELGSNNKAQKAWTDEMIKEICMPIKVDRLGNVLESSSSYKK

SEQ ID NO: 303 - protein, 1055 aa, Unknown
  Bacteroides sp.
MRIYRKDLAQDVDVTNELLKTEEDYVALFDWLNGKKEIDQKAFLKYPVFGLKKEIENYRWNYVQDKPYPCNETRSLMLARLEKCDISIEFLTKENEEALWHILYSVEDKNEIVKALQKFADKHDLNASFVDVFQKFPPFKKEYGSYSAKAIKKLLPLMRMGKYWSENSIDKGTRERIDKIITGEYDEKIENRVREKAIHLADVSDFKGLPLWLVCYIVYGRHSEAKEIIQWKSPADIDSYLRSFKQHSLRNPIVEQIIIETLRVVRDIWKQVGNIDEIHVELGREMKNPADKRKKMTQQMSENENTNLRIKYLLTEFLNPEYEVENVRPYSPSQQDILRIYEEGVLNSVSDLPEEISDILKKFTETDLKKRPSRSEVLRYKLWLEQKYRSPYTGEVIPLGKLFTPAYEIEHVIPQSCYFDDSFSNKVICEAEVNKLKSNLLGHEFIVKHHGEIVELPFGKKVRIFTVDEYEQFVKDNYSRTRSKMKKLLMDDIPEEFVTRQLNDSRYISKVVKSLLSNIVREKGEEEAISKNVIPCTGGVTDRLKKDWGINEVWNKIILPRFQRLNELTGTNKFTTKNVGIQEIPTMPLELQKGFNKKRIDHRHHAMDAIIIACANRNIINYLNNESATAKAELSRYDLQKMLCDKAKTDNNGNYKWVIRKPWASFTQDTYLALENIIVSFKQNLRVINKATNRFLHYNEEGKKIFVKQGKGDNWAIRKSMHKDTVFGEVNLRRIKTVALNEAMKNPQSIVVKDFKRKLLELWNLGFDAKRIKKYFEDNRETWSDINLSKIEVYYFSKDTKDRFFATRKPLDTSFDRKKIENNITDTGIQKILLRHLELKDNNPDIAFSPDGIDEMNRNIIQLNNGKYHQPIIKIRWYEQADKFAVGQTGNKSSKFVEAAKGTNLFFAVYESNILDKKTNTIIKKRNYATIPLNVAIERQKQGLPVAPEDENGNDPIFVLSPNDLVYLPTDDELANGIIAQPLDRGRIYKMVSSSGEQCFFIKHIVANVLVDKFEFSPLNKMERALTGEMIKMICIPIKVDRLGNVLESSSSYKK

SEQ ID NO: 304 - protein, 286 aa, Bacteroides uniformis
MLSYKYDKKKIEKYFKENAFLWKELDIAKVAVYYFTENTTEPLVAVRKSLDSTFNEKKIASVTDTGIQKILLNHLKSKEGKAELAFSAEGIEEMNRNLLQLNDGKGHQPIYKVRVYEPRGNKFKVGVLGNKGAKWVEAAKGTNLFFAIYITEDGNRTYETIPLNWVIEREKQGLVPVPDRNEKGDKLLFWLSPNDLVYLPTEEERDFGRINEPIDRGRIYKMVSSSGNQCFFIPQSISNAIISTKELGSNNKAEKSWDGEMIKNICIPVKVDRLGRIIEVKYRVNE

SEQ ID NO: 305 - protein, 1508 aa, Bacteroides uniformis
MRTILGLDLGTNSIGWAVINSVIKEQTERIWIEMAGSRIIPMDAAILGDFDKGNSISQTAERTRFRGVRRLRERQLLRRERLHKVLKILGFLPEHYLKGIDFEKHTGKFLSGSEPKLPWVKDRWGKYSFLFQTAFNEMLADFAKHQPSLVFDGKKIPYDWTVYYLRKKALTEMISKEELAWILLNFNQKRGYYQLRGEEEEDNAGKSVEFYALKVLSVEATDEKKGRDIWYNVHLENGWVYRRSSNVPLDWEGRVKEFIVTTDLNPDGTPKLDKYGEVKRSFRAPKEDDWMLIKKRTEADITGTHKTIGSYIYDALLQEPQQKIIGKLVKTVERKFYKEELNFILQKQCAFHAELQDRDLYMRCIEALYPGNEVQRRNIANRDFIYLLIDDVLFYQRPLKTKKSLIANCPYEENEYVNRKTGEIKTAPLKCIAKSHPLFQEFRLWYFLSNIRVYQKEREVNGTLHLDVDVTTEFLKTEDDYVALFDWLNSRKEIDQKAFLRYPAFGLKKEINNYRWNYVEDKFYPCNETRHAILSRLEKAGIGIDFLSDEKETALWHILYSVSDKQEIEKALATFAVKNGLNESFVEVFKKFPPFKSEYGAYSAKAIKKLLPLMRCGKYWDMSLIDGTTKERIERIIAGECDESIGAKVREKAMNLSDISCFKRLPLWLACYVVYNRHSEDKEITKWETPADIDAYLAAFKQHSLRNPIVEQVITETLRVVRDIWKQVGKIDEIRIELGREMKNPADKRKRMTTQILENENANLRIKALLAEFVNPEYGVENVRPYSPSQQEILRIYEDAVLKGEEQIPEDIDVILKKFNTSKLPTKSEFLRYKLWLEQKYRSPYTGELIPLAKLFTAAYEIEHVIPQSRYFDDSFSNKVICESAVNKLKDNQLGYEFIKNHHGQKVEVGFGKTVEIFSVDSYERFVKEQYAKSGIKMKKLLMDDIPEQFIERQLNDSRYISKVVKGLLSNIVREKNDSGEYEPEAVSKNILVCTGSVTDRLKKDWGMNDVWNSIVSPRFERLNALTETQCFGHWENKDGKKVFQTAVPLEYQKGFSKKRIDHRHHAMDAIVIACATRNHVNYLNNESASRNAKISRYDLQRLLCDKSRGDGNGNYRWIIKKPWTTFTQDAREALSGIIVSLKQNLRIINKTTNIYQHFDANGTRVYEKQKIGDSWAIRKPMHKDTVFGAVNLRKVKVVRLSVALDTPSMIVNKRVKNKVLELLSYKYDKKKIEKYFKENAFLWKELDIAKVAVYYFTENTTEPLVAVRKSLDSTFNEKKIASVTDTGIQKILLNHLKSKEGKAELAFSAEGIEEMNRNLLQLNDGKGHQPIYKVRVYEPRGNKFKVGVLGNKGAKWVEAAKGTNLFFAIYITEDGNRTYETIPLNWVIEREKQGLVPVPDRNEKGDKLLFWLSPNDLVYLPTEEERDFGRINEPIDRGRIYKMVSSSGNQCFFIPQSISNAIISTKELGSNNKAEKSWDGEMIKNICIPVKVDRLGRIIEVKYRVNE

SEQ ID NO: 306 - protein, 1210 aa, Bacteroides uniformis
MRTILGLDLGTNSIGWAVINSVIKEQTERIWIEMAGSRIIPMDAAILGDFDKGNSISQTAERTRFRGVRRLRERQLLRRERLHKVLKILGFLPEHYLKGIDFEKHTGKFLSGSEPKLPWVKDRWGKYSFLFQTAFNEMLADFAKHQPSLVFDGKKIPYDWTVYYLRKKALTEMISKEELAWILLNFNQKRGYYQLRGEEEEDNAGKSVEFYALKVLSVEATDEKKGRDIWYNVHLENGWVYRRSSNVPLDWEGRVKEFIVTTDLNPDGTPKLDKYGEVKRSFRAPKEDDWMLIKKRTEADITGTHKTIGSYIYDALLQEPQQKIIGKLVKTVERKFYKEELNFILQKQCAFHAELQDRDLYMRCIEALYPGNEVQRRNIANRDFIYLLIDDVLFYQRPLKTKKSLIANCPYEENEYVNRKTGEIKTAPLKCIAKSHPLFQEFRLWYFLSNIRVYQKEREVNGTLHLDVDVTTEFLKTEDDYVALFDWLNSRKEIDQKAFLRYPAFGLKKEINNYRWNYVEDKFYPCNETRHAILSRLEKAGIGIDFLSDEKETALWHILYSVSDKQEIEKALATFAVKNGLNESFVEVFKKFPPFKSEYGAYSAKAIKKLLPLMRCGKYWDMSLIDGTTKERIERIIAGECDESIGAKVREKAMNLSDISCFKRLPLWLACYVVYNRHSEDKEITKWETPADIDAYLAAFKQHSLRNPIVEQVITETLRVVRDIWKQVGKIDEIRIELGREMKNPADKRKRMTTQILENENANLRIKALLAEFVNPEYGVENVRPYSPSQQEILRIYEDAVLKGEEQIPEDIDVILKKFNTSKLPTKSEFLRYKLWLEQKYRSPYTGELIPLAKLFTAAYEIEHVIPQSRYFDDSFSNKVICESAVNKLKDNQLGYEFIKNHHGQKVEVGFGKTVEIFSVDSYERFVKEQYAKSGIKMKKLLMDDIPEQFIERQLNDSRYISKVVKGLLSNIVREKNDSGEYEPEAVSKNILVCTGSVTDRLKKDWGMNDVWNSIVSPRFERLNALTETQCFGHWENKDGKKVFQTAVPLEYQKGFSKKRIDHRHHAMDAIVIACATRNHVNYLNNESASRNAKISRYDLQRLLCDKSRGDGNGNYRWIIKKPWTTFTQDAREALSGIIVSLKQNLRIINKTTNIYQHFDANGTRVYEKQKIGDSWAIRKPMHKDTVFGAVNLRKALIPQHYNLTLFISS

SEQ ID NO: 307 - protein, 1504 aa, Bacteroides vulgatus
MKNIVGLDLGTNSIGWAVVNGSVNDDGSEQLVKIQASGSRIIPMDAAMIGDFNKGNSISQTAERTRLRGVRRLSERYLLRRERLHRILDILGFLPFHFAQDLDRHGKIVKGKEPKLAWRKNEAGQFEFIFQDSFKEMLEDFKLNHPNLITDDKKVPYDWTIYYLRKKGLTSKISKEELAWILLNFNQKRGYYQLRGEEEEENKNKLVEFYALKVVAVEDSGEKKGKDIWYNVHLENGWVYRRTSNMPLDWVGKTKEFIVTTDLEKDGTPKKDKEGNVKRSFRAPKEDDWSLLKKKTEADIDQTHKTVGVYIYDTLLGNPSQKIRGRLVRTIERKYYKEELKQILEKQKEFHLELQDRALYAACIEELYPINEAHRNNVGNRDFTYLFLEDILFYQRPLKSKKSLIDNCPYEENQGLDKETGEIKSFPVKCIAKSHPLFQEFRLWQFIVNLRIYRKDLAQDVDVTNELLKTEEDYVALFDWLNGKKEIDQKAFLKYPVFGLKKEIENYRWNYVQDKPYPCNETRSLMLARLEKCDISIEFLTKENEEALWHILYSVEDKNEIVKALQKFADKHDLNASFVDVFQKFPPFKKEYGSYSAKAIKKLLPLMRMGKYWSENSIDKGTRERIDKIITGEYDEKIENRVREKAIHLADVSDFKGLPLWLVCYIVYGRHSEAKEITQWKSPADIDSYLRSFKQHSLRNPIVEQIIIETLRVVRDIWKQVGNIDEIHVELGREMKNPADKRKKMTQQMSENENTNLRIKYLLTEFLNPEYEVENVRPYSPSQQDILRIYEEGVLNSVSDLPEEISDILKKFTETDLKKRPSRSEILRYKLWLEQKYRSPYTGEVIPLGKLFTPAYEIEHVIPQSCYFDDSFSNKVICEAEVNKLKSNLLGHEFIVKHHGEIVELPFGKKVRIFTVDEYEQFVKDNYSRTRSKMKKLLMDDIPEEFVTRQLNDSRYISKVVKSLLSNIVREKGEEEAISKNVIPCTGGVTDRLKKDWGINEVWNKIILPRFQRLNELTGTNKFTTKNVGIQEIPTMPLELQKGFNKKRIDHRHHAMDAIIIACANRNIINYLNNESATAKAELSRYDLQKMLCDKAKTDNNGNYKWVIRKPWASFTQDTYLALENIIVSFKQNLRVINKATNRFLHYNEEGKKIFVKQGKGDNWAIRKSMHKDTVFGEVNLRRIKTVALNEAMKNPQSIVVKDFKRKLLELWNLGFDAKRIKKYFEDNRETWSDINLSKIEVYYFSKDTKDRFFATRKPLDTSFDRKKIENNITDTGIQKILLRHLELKDNNPDIAFSPDGIDEMNRNIIQLNNGKYHQPIIKIRWYEQADKFAVGQTGNKFSKFVEAAKGTNLFFAVYESNILDKKTNTIIKKRNYATIPLNVAIERQKQGLPVAPEDENGNDPIFVLSPNDLVYLPTDDELANGIIAQPLDRGRIYKMVSCTGNEGHFIPARIANPILQTIELGSNNKAQKAWTDEMIKEICMPIKVDRLGNVLESSSSYKK

SEQ ID NO: 308 - protein, 1153 aa, Barnesiella intestinihominis
MKNILGLDLGLSSIGWSVIRENSEEQELVAMGSRVVSLTAAELSSFTQGNGVSINSQRTQKRTQRKGYDRYQLRRTLLRNKLDTLGMLPDDSLSYLPKLQLWGLRAKAVTQRIELNELGRVLLHLNQKRGYKSIKSDFSGDKKITDYVKTVKTRYDELKEMRLTIGELFFRRLTENAFFRCKEQVYPRQAYVEEFDCIMNCQRKFYPDILTDETIRCIRDEIIYYQRPLKSCKYLVSRCEFEKRFYLNAAGKKTEAGPKVSPRTSPLFQVCRLWESINNIVVKDRRNEIVFISAEQRAALFDFLNTHEKLKGSDLLKLLGLSKTYGYRLGEQFKTGIQGNKTRVEIERALGNYPDKKRLLQFNLQEESSSMVNTETGEIIPMISLSFEQEPLYRLWHVLYSIDDREQLQSVLRQKFGIDDDEVLERLSAIDLVKAGFGNKSSKAIRRILPFLQLGMNYAEACEAAGYNHSNNYTKAENEARALLDRLPAIKKNELRQPVVEKILNQMVNVVNALMEKYGRFDEIRVELARELKQSKEERSNTYKSINKNQRENEQIAKRIVEYGVPTRSRIQKYKMWEESKHCCIYCGQPVDVGDFLRGFDVEVEHIIPKSLYFDDSFANKVCSCRSCNKEKNNRTAYDYMKSKGEKALSDYVERVNTMYTNNQISKTKWQNLLTPVDKISIDFIDRQLRESQYIARKAKEILTSICYNVTATSGSVTSFLRHVWGWDTVLHDLNFDRYKKVGLTEVIEVNHRGSVIRREQIKDWSKRFDHRHHAIDALTIACTKQAYIQRLNNLRAEEGPDFNKMSLERYIQSQPHFSVAQVREAVDRILVSFRAGKRAVTPGKRYIRKNRKRISVQSVLIPRGALSEESVYGVIHVWEKDEQGHVIQKQRAVMKYPITSINREMLDKEKVVDKRIHRILSGRLAQYNDNPKEAFAKPVYIDKECRIPIRTVRCFAKPAINTLVPLKKDDKGNPVAWVNPGNNHHVAIYRDEDGKYKERTVTFWEAVDRCRVGIPAIVTQPDTIWDNILQRNDISENVLESLPDVKWQFVLSLQQNEMFILGMNEEDYRYAMDQQDYALLNKYLYRVQKLSKSDYSFRYHTETSVEDKYDGKPNLKLSMQMGKLKRVSIKSLLGLNPHKVHISVLGEIKEIS

SEQ ID NO: 309 - protein, 1352 aa, Belliella baltica
MKKILGLDLGTTSIGWAFIKEPEKDVVGSEIVDMGVRIVPLSSDEENDFAKGNTISINADRTLKRGARRNLQRFKQRRNALLEIFKEKKLISTNFKYAEDGPSSTFSTLNLRAKAAKEKIELQDLVKVLLQINKKRGYKSSRKAKSEEDDGSAIDSMGIAKELYENDLTPGQWVYEALQKGRKNVPDFYRSDLQEEFKKIVNYQSEFFPDIFNASFVEDWMGKASTPTKQYFNKKGVQLAENKGKREERRLQEYKWRAEAVNFKIDLSEIALILSQINSQISNSSGYLGAISDRSKELYFKNLTVGQYLYQQIKKNPHTRLKGQVFYRQDYLDEFERIWSVQSSFYPQLNDALKREVRDITIFFQRRLKSQKHLISNCEFEDHHKVVPKSHPVFQEFRIWQNLNNLLLIKKDNLNEKFDLELESKIALANELAFKRELNVKDALKILGLKPNEWEFNFTKIEGNRTNQAFFDAFAKIIELEDGEPIDLGDLKADDILDQFSEAFLRIGIDTELLQVNSDIEGAEYEKQSYIQFWHLLYSSEDDQKLKLNLIRKFGFKPEHAKILASISLQDDHASLSSRAIKKILPHLQSGLIYDKACTYAGYNHSSSFTKDENEKRELRAELELLKKNSLRNPVVEKILNQMINVVNAILKDPELGRPDEIRVEMARELKANAEQRKNMTSNIASATRDHDKYREILKSEFGLKRVTKNDLLRYKLWLETDGISLYTGKPIEASKLFSKEYDIEHIIPKARLFDDSFSNKTICERQLNIDKANVTAFSFLQNKLSADEFEQYQSRVKSLYGKLSKAKIQKLLMANDKIPEDFIARQLQETRYISKKAKEILFEISRRVSVTTGTITDKLREDWGLVEIMKELNWEKYDKLGLTYTIEGKHGERLNKIKDWSKRNDHRHHAMDALTVALTKPAYIQYLNNLNAKGLNNKKGTEVFAIEQKYLKRENGKLCFIPPIENIRSEAKKHLSRILVSYKAKNKVVTINKNKTKSKAGLNEQIALTPRGQLHKETVYGKSFHYSTKFEKIGASFNVQKINTVAKKEEREALLKRLAENGNDPKKAFTGKNTLNKMPIYLDLGKNIKLSEKVKTVVLEQNYTIRKNIDPDLKVDKVIDVGIKRILESRLEEFGGNAKLAFSNLEENPIWLNKEKGISIKRVKISGVSNVESLHVKKDHFGEPILDQEGNEIPVDFVSTGNNHHVAIYEDENGNLQEEVVSFFEAVVRQNQGLPIIKKNHTLGWKFLFTLKQNEYFVFPSDDFVPADVDLMDEQNYHLISPNLFRVQKIARKNYVFNNHLETKAVDNDLLKSKKELSKITYHFYQTPEHLRGIIKIRINHLGKIIQIGEY

SEQ ID NO: 310 - protein, 1415 aa, Bergeyella zoohelcum
MKHILGLDLGTNSIGWALIERNIEEKYGKIIGMGSRIVPMGAELSKFEQGQAQTKNADRRTNRGARRLNKRYKQRRNKLIYILQKLDMLPSQIKLKEDFSDPNKIDKITILPISKKQEQLTAFDLVSLRVKALTEKVGLEDLGKIIYKYNQLRGYAGGSLEPEKEDIFDEEQSKDKKNKSFIAFSKIVFLGEPQEEIFKNKKLNRRAIIVETEEGNFEGSTFLENIKVGDSLELLINISASKSGDTITIKLPNKTNWRKKMENIENQLKEKSKEMGREFYISEFLLELLKENRWAKIRNNTILRARYESEFEAIWNEQVKHYPFLENLDKKTLIEIVSFIFPGEKESQKKYRELGLEKGLKYIIKNQVVFYQRELKDQSHLISDCRYEPNEKAIAKSHPVFQEYKVWEQINKLIVNTKIEAGTNRKGEKKYKYIDRPIPTALKEWIFEELQNKKEITFSAIFKKLKAEFDLREGIDFLNGMSPKDKLKGNETKLQLQKSLGELWDVLGLDSINRQIELWNILYNEKGNEYDLTSDRTSKVLEFINKYGNNIVDDNAEETAIRISKIKFARAYSSLSLKAVERILPLVRAGKYFNNDFSQQLQSKILKLLNENVEDPFAKAAQTYLDNNQSVLSEGGVGNSIATILVYDKHTAKEYSHDELYKSYKEINLLKQGDLRNPLVEQIINEALVLIRDIWKNYGIKPNEIRVELARDLKNSAKERATIHKRNKDNQTINNKIKETLVKNKKELSLANIEKVKLWEAQRHLSPYTGQPIPLSDLFDKEKYDVDHIIPISRYFDDSFTNKVISEKSVNQEKANRTAMEYFEVGSLKYSIFTKEQFIAHVNEYFSGVKRKNLLATSIPEDPVQRQIKDTQYIAIRVKEELNKIVGNENVKTTTGSITDYLRNHWGLTDKFKLLLKERYEALLESEKFLEAEYDNYKKDFDSRKKEYEEKEVLFEEQELTREEFIKEYKENYIRYKKNKLIIKGWSKRIDHRHHAIDALIVACTEPAHIKRLNDLNKVLQDWLVEHKSEFMPNFEGSNSELLEEILSLPENERTEIFTQIEKFRAIEMPWKGFPEQVEQKLKEIIISHKPKDKLLLQYNKAGDRQIKLRGQLHEGTLYGISQGKEAYRIPLTKFGGSKFATEKNIQKIVSPFLSGFIANHLKEYNNKKEEAFSAEGIMDLNNKLAQYRNEKGELKPHTPISTVKIYYKDPSKNKKKKDEEDLSLQKLDREKAFNEKLYVKTGDNYLFAVLEGEIKTKKTSQIKRLYDIISFFDATNFLKEEFRNAPDKKTFDKDLLFRQYFEERNKAKLLFTLKQGDFVYLPNENEEVILDKESPLYNQYWGDLKERGKNIYVVQKFSKKQIYFIKHTIADIIKKDVEFGSQNCYETVEGRSIKENCFKLEIDRLGNIVKVIKR

SEQ ID NO: 311 - protein, 1430 aa, Bergeyella zoohelcum
MKHILGLDLGTNSIGWAVVKEAQNDNEQSEIVDVGVRVNPLTTDEKTNFEKGKPISTNADRTLKRSARRNLQRYKLRRKELIELLKEHQLISTDTILTENGKGTTFQTLELRAKSAKEKISLEELARVFLTINKKRGYKSSRKAKNEDEGQLIDGMEIAKRLYEENLTTGQLSLQLLKEGKKSLPDYYRSDLQFELDKVWNFQKQFHSDILTDEFYAQLKGKGQRATSALFLAKYQIYTAENKGSREDKKLQAYQWRVDALSKELTREQLAFVITEINNNLNNSSGYLGAISDRSKELYFNNETVGEYLWKQIAANPHTSLKNQVFYRQDYLDEFEQIWKTQSAFYPEILTDELKKELRDVVIFYQRKLKSQKSLVSFCEFENKEIEIKKEDGTSTKKVIGLKVAPKSSPLFQEFKIWQNLNNVLIRKKGSKTKKVAKNQQAVLFEEEKTISELDLEAKQALFNELNLKGNLKADYCLEILGYSPKEWEMNYSVLEGNRTNKALYEAYLKITDLEGYDAKNHLKVKLNKDEVELDDLKVPASEIKDMVQAIFKEAGINTDILHFNAELDGKDFENQASYQLWHLLYSYEGDDSKSGNELLYKLLETKFGFKKEYAQILANVSLSDDYGSLSTKAMRKIHPYIKENKFSTACELAGYRHSKHSLTKEENDNRVLKDSLEVLKKNSLRQPVVEKILNQMINLVNALLKKYRTENPNFKFDEIRIELARELKKNAEERANMTANINKAKTEHEKIIKILKNEFGLPNPTRNDIIRYRLYEELKANGYKDLYTNIKIPQEKLFTKEIDIEHIIPKSRVFDDSFSNKTLSFRKTNLDKGERTAFDYMESKFGADKLEEYVARVEDLYKNNIISKAKYQKLLKKESEIGDGFVERDLRETQYIAKKAKEILLQITPNVLSTSGGITDRLREDWDLINVMKELNLPKYRALGLTQMEDRKYGQQVEVITDWTKRNDHRHHAMDALTVAFTKHNHIQYLNYLNARKNEKHKEHSNIMGIQQLETIKVTDKNGNEKRVFKAPMPNFRQVTKAFLENILISHKAKNKVVTKNKNKVAGSNKVQEVLTPRGQLHKETVYGKYQYYVQKEEKIGAKFDLETIKKVANPLYQSLLKKRLEENGGDPKKAFTGKNSLAKNPIYLDDTQTEQLPEKVKLVWLENSFSIRKDITPENFKDEKLIDKILDEGVKRILKERLQSFGNDAKKAFSDLDKNPIWLNKEKGITIKRVTISGVANAEPLHTKKDHLGKEILDKEGKPIPVDFISTGSNHHVAVYRDEKGNLQEKVVSVFEAVVRANQGLPIIDKTYNQHLGWEFLFTMKQNEMFVFPNESTGFNPNDIDLLDPKNKRIISPNLFRVQKFSKLQYGNSFVREFVFRHHLETTVEDRKELQGITYKQMKNSTFFNDIIKVRINHLGDIVSIGEY

SEQ ID NO: 312 - protein, 1281 aa, Bifidobacterium bifidum
MEDDSQHDIREIYLAIHHMVKYRGNFLVEGTLESSNAFKEDELLKLLGRITRYEMSEGEQNSDIEQDDENKLVAPANGQLADALCATRGSRSMRVDNALEALSAVNDLSREQRAIVKAIFAGLEGNKLDLAKIFVSKEFSSENKKILGIYFNKSDYEEKCVQIVDSGLLDDEEREFLDRMQGQYNAIALKQLLGRSTSVSDSKCASYDAHRANWNLIKLQLRTKENEKDINENYGILVGWKIDSGQRKSVRGESAYENMRKKANVFFKKMIETSDLSETDKNRLIHDIEEDKLFPIQRDSDNGVIPHQLHQNELKQIIKKQGKYYPFLLDAFEKDGKQINKIEGLLAFRVPYFVGPLVVPEDLQKSDNSENHWMVRKKKGEITPWNFDEMVDKDASGRKFIERLVGTDSYLLGEPTLPKNSLLYQEYEVLNELNNVRLSVRTGNHWNDKRRMRLGREEKTLLCQRLFMKGQTVTKRTAENLLRKEYGRTYELSGLSDESKFTSSLSTYGKMCRIFGEKYVNEHRDLMEKIVELQTVFEDKETLLHQLRQLEGISEADCALLVNTHYTGWGRLSRKLLTTKAGECKISDDFAPRKHSIIEIMRAEDRNLMEIITDKQLGFSDWIEQENLGAENGSSLMEVVDDLRVSPKVKRGIIQSIRLIDDISKAVGKRPSRIFLELADDIQPSGRTISRKSRLQDLYRNANLGKEFKGIADELNACSDKDLQDDRLFLYYTQLGKDMYTGEELDLDRLSSAYDIDHIIPQAVTQNDSIDNRVLVARAENARKTDSFTYMPQIADRMRNFWQILLDNGLISRVKFERLTRQNEFSEREKERFVQRSLVETRQIMKNVATLMRQRYGNSAAVIGLNAELTKEMHRYLGFSHKNRDINDYHHAQDALCVGIAGQFAANRGFFADGEVSDGAQNSYNQYLRDYLRGYREKLSAEDRKQGRAFGFIVGSMRSQDEQKRVNPRTGEVVWSEEDKDYLRKVMNYRKMLVTQKVGDDFGALYDETRYAATDPKGIKGIPFDGAKQDTSLYGGFSSAKPAYAVLIESKGKTRLVNVTMQEYSLLGDRPSDDELRKVLAKKKSEYAKANILLRHVPKMQLIRYGGGLMVIKSAGELNNAQQLWLPYEEYCYFDDLSQGKGSLEKDDLKKLLDSILGSVQCLYPWHRFTEEELADLHVAFDKLPEDEKKNVITGIVSALHADAKTANLSIVGMTGSWRRMNNKSGYTFSDEDEFIFQSPSGLFEKRVTVGELKRKAKKEVNSKYRTNEKRLPTLSGASQP

SEQ ID NO: 313 - protein, 1121 aa, Bifidobacterium dentium
MSVGLAAIEVDETGFPIRILNIQSVIHDGGIDPQLGKKKSISRKAISGVARRTRRMRRRKVVRLRQLDATLESLGFPIVEPDSLDTWEIWLTRAKLASSYIQDDETRKEDVSIALRHIARHRGWRNPYSNVESLFVDVAPSEQYEELRRKAEEKLGTSLSGNPTSAEIVECILKRQVGEVQLRTRSRKGVNGNAVEKEGLLPTKLMQSDNAAEIRRIFKVQRIDDETGRKLLRAVFKACSPKGSVERRVGRDALAPGLPRALKASLAFQEYRIANVLTNLVISEDGTKRKLTIAEKQRVFGFLSSNETDDITWIDVAEKLGLERRQIQGVGCLTADGEERISSTPPRNITALHIHSAKPVIREKLVAWWKAASPTVRETMVELLSNTVDIDRVREDMDYSSAVAFIDSLGDEELTALDSVDLLSGRAAYSRQTLKQLTERMLNTDDDLHEARKAVFGVDDNWKPPVDAISTSVGNPAVDRVLKIVNRYLLACQKRWRNPQSVQIEHVRESFSSVAKAKETERVQGERARYRNDLRRELCEQEGLNKIRESDIRRWESVQRQNGTCLYCGSPITFRTCEMDHIVPRKGVGSTNTRVNLAAACAACNKLKSNTAFSVWARTEGAANRKVSQRDAIERVKTFIFNKSVPPREQRAFKQAVISRLRQAESDPAIDNRSIESVAWMADELHRRIEAYFNQDADVSGNTPATQVWVFQGRVTALARKASGIEGRIHFAGEWKKTRLDRRHHAVDAAVIAMMNHSAAQTLVERDSLRLSQWITRKPETWKNYPFSEGQKKTRFKEWLDCMNALLDLLNDALDSDRVPVTRCQRMSLGNSQAHAATIRKMKRVELFSPMDADLIRRASTPALYCALTRLPEYSPEKGLPENRGREIVLNGRHIRSTETVDFFASGAAQLMVRNGSAEIGDSIHHMRIYRYRKTGAKSQEYVYGMIRVFQIDLLHASSENLFAVQLPSQSVSVRYGDKNVVQAIQEGRAEYLGHIVPNDEILISYEGVRMKDSEKIGAYANDFSGTASELAQRRHWVVVGSDVSKLALRPSYLSEEGLENSGSESERLSKQTRKVIEGKGWVVAVNILAKYHPVVIRRNALGEPRFRTNSGMPVSWRWDR

SEQ ID NO: 314 - protein, 354 aa, Bifidobacterium longum
AKQYVNSASIDDAEAETMKTTVSVFQGRVTASARRAAGIEGKIHFIGQQSKTRLDRRHHAVDASVIAMMNTAAAQTLMERESLRESQRLIGLMPGERSWKEYPYEGTSRYESFHLWLDNMDVLLELLNDALDNDRIAVMQSQRYVLGNSIAHDATIHPLEKVPLGSAMSADLIRRASTPALWCALTRLPDYDEKEGLPEDSHREIRVHDTRYSADDEMGFFASQAAQIAVQEGSADIGSAIHHARVYRCWKTNAKGVRKYFYGMIRVFQTDLLRACHDDLFTVPLPPQSISMRYGEPRVVQALQSGNAQYLGSLVVGDEIEMDFSSLDVDGQIGEYLQFFSQFSGGNLAWKHWV

SEQ ID NO: 315 - protein, 1124 aa, Bifidobacterium longum
LTGHSGHTFWPTSSSPPIQLEQEKRPLPQRNTSQNGHTFWPITRERCFMRGKRYRIGIDVGLNSVGLAAVEVSDENSPVRLLNAQSVIHDGGVDPQKNKEAITRKNMSGVARRTRRMRRRKRERLHKLDMLLGKFGYPVIEPESLDKPFEEWHVRAELATRYIEDDELRRESISIALRHMARHRGWRNPYRQVDSLISDNPYSKQYGELKEKAKAYNDDATAAEEESTPAQLVVAMLDAGYAEAPRLRWRTGSKKPDAEGYLPVRLMQEDNANELKQIFRVQRVPADEWKPLFRSVFYAVSPKGSAEQRVGQDPLAPEQARALKASLAFQEYRIANVITNLRIKDASAELRKLTVDEKQSIYDQLVSPSSEDITWSDLCDFLGFKRSQLKGVGSLTEDGEERISSRPPRLTSVQRIYESDNKIRKPLVAWWKSASDNEHEAMIRLLSNTVDIDKVREDVAYASAIEFIDGLDDDALTKLDSVDLPSGRAAYSVETLQKLTRQMLTTDDDLHEARKTLFNVTDSWRPPADPIGEPLGNPSVDRVLKNVNRYLMNCQQRWGNPVSVNIEHVRSSFSSVAFARKDKREYEKNNEKRSIFRSSLSEQLRADEQMEKVRESDLRRLEAIQRQNGQCLYCGRTITFRTCEMDHIVPRKGVGSTNTRTNFAAVCAECNRMKSNTPFAIWARSEDAQTRGVSLAEAKKRVTMFTFNPKSYAPREVKAFKQAVIARLQQTEDDAAIDNRSIESVAWMADELHRRIDWYFNAKQYVNSASIDDAEAETMKTTVSVFQGRVTASARRAAGIEGKIHFIGQQSKTRLDRRHHAVDASVIAMMNTAAAQTLMERESLRESQRLIGLMPGERSWKEYPYEGTSRYESFHLWLDNMDVLLELLNDALDNDRIAVMQSQRYVLGNSIAHDATIHPLEKVPLGSAMSADLIRRASTPALWCALTRLPDYDEKEGLPEDSHREIRVHDTRYSADDEMGFFASQAAQIAVQEGSADIGSAIHHARVYRCWKTNAKGVRKYFYGMIRVFQTDLLRACHDDLFTVPLPPQSISMRYGEPRVVQALQSGNAQYLGSLVVGDEIEMDFPVSMLMVRLASIYNSSRSLVEGTLHGNIGLLMDSLTRRS

SEQ ID NO: 316 - protein, 166 aa, Bifidobacterium longum
MGLAAVEVSDENSPVRLLNAQSVIHDGGVDPQKNKEAITRKNMSGVARRTRRMRRRKRERLHKLDMLLGKFGYPVIEPESLDKPFEEWHVRAELATRYIEDDELRRESISIALRHMARHRGWRNPYRQVDSLISDNPYSKQYGELKEKAKAYNDDATAAEEESTPA

SEQ ID NO: 317 - protein, 1138 aa, Bifidobacterium longum
MNSVGLAAVEVSDENSPVRLLNAQSVIHDGGVDPQKNKEAITRKNMSGVARRTRRMRRRKRERLHKLDMLLGKFGYPVIEPESLDKPFEEWHVRAELATRYIEDDELRRESISIALRHMARHRGWRNPYRQVDSLISDNPYSKQYGELKEKAKAYNDDATAAEEESTPAQLVVAMLDAGYAEAPRLRWRTGSKKPDAEGYLPVRLMQEDNANELKQIFRVQRVPADEWKPLFRSVFYAVSPKGSAEQRVGQDPLAPEQARALKASLAFQEYRIANVITNLRIKDASAELRKLTVDEKQSIYDQLVSPSSEDITWSDLCDFLGFKRSQLKGVGSLTEDGEERISSRPPRLTSVQRIYESDNKIRKPLVAWWKSASDNEHEAMIRLLSNTVDIDKVREDVAYASAIEFIDGLDDDALTKLDSVDLPSGRAAYSVETLQKLTRQMLTTDDDLHEARKTLFNVTDSWRPPADPIGEPLGNPSVDRVLKNVNRYLMNCQQRWGNPVSVNIEHVRSSFSSVAFARKDKREYEKNNEKRSIFRSSLSEQLRADEQMEKVRESDLRRLEAIQRQNGQCLYCGRTITFRTCEMDHIVPRKGVGSTNTRTNFAAVCAECNRMKSNTPFAIWARSEDAQTRGVSLAEAKKRVTMFTFNPKSYAPREVKAFKQAVIARLQQTEDDAAIDNRSIESVAWMADELHRRIDWYFNAKQYVNSASIDDAEAETMKTTVSVFQGRVTASARRAAGIEGKIHFIGQQSKTRLDRRHHAVDASVIAMMNTAAAQTLMERESLRESQRLIGLMPGERSWKEYPYEGTSRYESFHLWLDNMDVLLELLNDALDNDRIAVMQSQRYVLGNSIAHDATIHPLEKVPLGSAMSADLIRRASTPALWCALTRLPDYDEKEGLPEDSHREIRVHDTRYSADDEMGFFASQAAQIAVQEGSADIGSAIHHARVYRCWKTNAKGVRKYFYGMIRVFQTDLLRACHDDLFTVPLPPQSISMRYGEPRVVQALQSGNAQYLGSLVVGDEIEMDFSSLDVDGQIGEYLQFFSQFSGGNLAWKHWVVDGFFNQTQLRIRPRYLAAEGLAKAFSDDVVPDGVQKIVTKQGWLPPVNTASKTAVRIVRRNAFGEPRLSSAHHMPCSWQWRHE

SEQ ID NO: 318 - protein, 182 aa, Bifidobacterium longum
MRGKRYRIGIDVGLNSVGLAAVEVSDENSPVRLLNAQSVIHDGGVDPQKNKEAITRKNMSGVARRTRRMRRRKRERLHKLDMLLGKFGYPVIEPESLDKPFEEWHVRAELATRYIEDDELRRESISIALRHMARHRGWRNPYRQVDSLISDNPYSKQYGELKEKAKAYNDDATAAEEESTPA

SEQ ID NO: 319 - protein, 441 aa, Bifidobacterium longum
MVAMLDAGYAEAPRLRWRTGSKKPDAEGYLPVRLMQEDNANELKQIFRVQRVPADEWKPLFRSVFYAVSPKGSAEQRVGQDPLAPEQARALKASLAFQEYRIANVITNLRIKDASAELRKLTVDEKQSIYDQLVSPSSEDITWSDLCDFLGFKRSQLKGVGSLTEDGEERISSRPPRLTSVQRIYESDNKIRKPLVAWWKSASDNEHEAMIRLLSNTVDIDKVREDVAYASAIEFIDGLDDDALTKLDSVDLPSGRAAYSVETLQKLTRQMLTTDDDLHEARKTLFNVTDSWRPPADPIGEPLGNPSVDRVLKNVNRYLMNCQQRWGNPVSVNIEHVRSSFSSVAFARKDKREYEKNNEKRSIFRSSLSEQLRADEQMEKVRESDLRRLEAIQRQNGQCLYCGRTITFRTCEMDHIVPRKGVGSTNTRTNFAAVCAECNRM

SEQ ID NO: 320 - protein, 967 aa, Bifidobacterium longum
MVAMLDAGYAEAPRLRWRTGSKKPDAEGYLPVRLMQEDNANELKQIFRVQRVPADEWKPLFRSVFYAVSPKGSAEQRVGQDPLAPEQARALKASLAFQEYRIANVITNLRIKDASAELRKLTVDEKQSIYDQLVSPSSEDITWSDLCDFLGFKRSQLKGVGSLTEDGEERISSRPPRLTSVQRIYESDNKIRKPLVAWWKSASDNEHEAMIRLLSNTVDIDKVREDVAYASAIEFIDGLDDDALTKLDSVDLPSGRAAYSVETLQKLTRQMLTTDDDLHEARKTLFNVTDSWRPPADPIGEPLGNPSVDRVLKNVNRYLMNCQQRWGNPVSVNIEHVRSSFSSVAFARKDKREYEKNNEKRSIFRSSLSEQLRADEQMEKVRESDLRRLEAIQRQNGQCLYCGRTITFRTCEMDHIVPRKGVGSTNTRTNFAAVCAECNRMKSNTPFAIWARSEDAQTRGVSLAEAKKRVTMFTFNPKSYAPREVKAFKQAVIARLQQTEDDAAIDNRSIESVAWMADELHRRIDWYFNAKQYVNSASIDDAEAETMKTTVSVFQGRVTASARRAAGIEGKIHFIGQQSKTRLDRRHHAVDASVIAMMNTAAAQTLMERESLRESQRLIGLMPGERSWKEYPYEGTSRYESFHLWLDNMDVLLELLNDALDNDRIAVMQSQRYVLGNSIAHDATIHPLEKVPLGSAMSADLIRRASTPALWCALTRLPDYDEKEGLPEDSHREIRVHDTRYSADDEMGFFASQAAQIAVQEGSADIGSAIHHARVYRCWKTNAKGVRKYFYGMIRVFQTDLLRACHDDLFTVPLPPQSISMRYGEPRVVQALQSGNAQYLGSLVVGDEIEMDFSSLDVDGQIGEYLQFFSQFSGGNLAWKHWVVDGFFNQTQLRIRPRYLAAEGLAKAFSDDVVPDGVQKIVTKQGWLPPVNTASKTAVRIVRRNAFGEPRLSSAHHMPCSWQWRHE

SEQ ID NO: 321 - protein, 1151 aa, Unknown
  Bifidobacterium sp.
MRGKRYRIGIDVGLNSVGLAAVEVSDENSPVRLLNAQSVIHDGGVDPQKNKEAITRKNMSGVARRTRRMRRRKRERLHKLDMLLGKFGYPVIEPESLDKPFEEWHVRAELATRYIEDDELRRESISIALRHMARHRGWRNPYRQVDSLISDNPYSKQYGELKEKAKAYNDDATAAEEESTPAQLVVAMLDAGYAEAPRLRWRTGSKKPDAEGYLPVRLMQEDNANELKQIFRVQRVPADEWKPLFRSVFYAVSPKGSAEQRVGQDPLAPEQARALKASLAFQEYRIANVITNLRIKDASAELRKLTVDEKQSIYDQLVSPSSEDITWSDLCDFLGFKRSQLKGVGSLTEDGEERISSRPPRLTSVQRIYESDNKIRKPLVAWWKSASDNEHEAMIRLLSNTVDIDKVREDVAYASAIEFIDGLDDDALTKLDSVDLPSGRAAYSVETLQKLTRQMLTTDDDLHEARKTLFNVTDSWRPPADPIGEPLGNPSVDRVLKNVNRYLMNCQQRWGNPVSVNIEHVRSSFSSVAFARKDKREYEKNNEKRSIFRSSLSEQLRADEQMEKVRESDLRRLEAIQRQNGQCLYCGRTITFRTCEMDHIVPRKGVGSTNTRTNFAAVCAECNRMKSNTPFAIWARSEDAQTRGVSLAEAKKRVTMFTFNPKSYAPREVKAFKQAVIARLQQTEDDAAIDNRSIESVAWMADELHRRIDWYFNAKQYVNSASIDDAEAETMKTTVSVFQGRVTASARRAAGIEGKIHFIGQQSKTRLDRRHHAVDASVIAMMNTAAAQTLMERESLRESQRLIGLMPGERSWKEYPYEGTSRYESFHLWLDNMDVLLELLNDALDNDRIAVMQSQRYVLGNSIAHDATIHPLEKVPLGSAMSADLIRRASTPALWCALTRLPDYDEKEGLPEDSHREIRVHDTRYSADDEMGFFASQAAQIAVQEGSADIGSAIHHARVYRCWKTNAKGVRKYFYGMIRVFQTDLLRACHDDLFTVPLPPQSISMRYGEPRVVQALQSGNAQYLGSLVVGDEIEMDFSSLDVDGQIGEYLQFFSQFSGGNLAWKHWVVDGFFNQTQLRIRPRYLAAEGLAKAFSDDVVPDGVQKIVTKQGWLPPVNTASKTAVRIVRRNAFGEPRLSSAHHMPCSWQWRHE

SEQ ID NO: 322 - protein, 1092 aa, Brevibacillus laterosporus
MAYTMGIDVGIASCGWAIVDLERQRIIDIGVRTFEKAENPKNGEALAVPRREARSSRRRLRRKKHRIERLKYMFVRNGLAVDIQHLEQTLRSQNEIDVWQLRVDGLDRMLTQKEWLRVLIHLAQRRGFQSNRKTDGSSEDGQVLVNVTENDRLMEEKDYRTVAEMMVKDEKFSDHKRNKNGNYHGVVSRASLLVEIHTLFESQRQHHNFLASKDFELEYINIWSSQRPVATKDQIEKMIGTCTFLPKEKRAPKASWHFQYFMLLQTINHIRITNAQGTRPLNKEEIEQVVNMALTKSKVSYHDIRKVLDLSEEYQFVGLDYGKEDEKKKVESKETIIKLDDYHKLNKIFNEVELAKGETWEAVDYDTVAYALTFFKDDEDIRDYLQNKYKDSKNRLVKNVANKEYTNELIEKVSTLSFRKVGHLSLKALRKIIPFLEQGMTYDKACQAAGFNFQGISKKKRSVVLPVIDQISNPVVNRALTQTRKVINALIKKYGSPETIHIETARELSKRFDERKNITKDYKENRDKNERAKKHLSELGIINPTGLDIVKYKLWCEQQGRCMYSNQPISFERLRESGYTEVDHIIPYSRSMNDSYNNRVLVMTRENREKSNQTPYEYMGNDTQRWDEFEQRVTTNPQIKKEKRQNLLLKGFTNRRELEMLERNLNDTRHITKYLSHFISTNLEFSPSDKKKKVVNTSGRITSHLRSRWGLEKNREQNDLHHAMDAVVIAVTSDSFIQQVTNYYKRKERRELNGDDKFPLPWKFFREEVIARLSPNPKEQIEALPNHFYSEDELADLQPIFVSRMPKRSITGEAHQAQFRRVVGKTKEGKNITAKKTALVDISYDKNGDFNMYGRETDPATYEAIKERYLEFGGNAKKAFSTDLHKPKKDGTKGPLIKSVRIMENKTLVHPVNKGKGVVYNSSIVRTDVFQRKEKYYLLPVYVTDVTKGKLPNKVIAAKKGYDDWIEVDDSFTFLYSLYPNDLIFIRQNPKKKISLKKRIESHSISDSKEVQEILTYYKGVDSSTAAIEFITHDGSYYAKGVGVQNLDCFEKYQVDILGNYSKVKGEKRLELETSDNNHKGKDVNSIKSTSR

SEQ ID NO: 323 - protein, 103 aa, Butyrivibrio fibrisolvens
MISVGQSRKDLEDLGYEFKLSFYKEDIIEYEKNGDILVERFLSRTMPQVRNYIETKPIDRPKYDKRNPVGLSKTSSIRKITMDILGNRFYVDKMSFNNVVGTQ

SEQ ID NO: 324 - protein, 177 aa, Butyrivibrio fibrisolvens
MLIAFSQMGYDAYHELTNKYIDFETGEIIDKEGFNELLNNDLVYKNTMYESKWLKIKGNIEKAAEKNKYWYQVNKKCNRGLCNQTVYGTRESDGDVYKISKIDIRTDDGFKKFKNIVDKGNESVFLMYENDPKTFELIMDIYKNYSDSKNPFVQYEKETGDIIRKYSKKITGQRFLN

SEQ ID NO: 325 - protein, 1442 aa, Caenispirillum salinarum
MPVLSPLSPNAAQGRRRWSLALDIGEGSIGWAVAEVDAEGRVLQLTGTGVTLFPSAWSNENGTYVAHGAADRAVRGQQQRHDSRRRRLAGLARLCAPVLERSPEDLKDLTRTPPKADPRAIFFLRADAARRPLDGPELFRVLHHMAAHRGIRLAELQEVDPPPESDADDAAPAATEDEDGTRRAAADERAFRRLMAEHMHRHGTQPTCGEIMAGRLRETPAGAQPVTRARDGLRVGGGVAVPTRALIEQEFDAIRAIQAPRHPDLPWDSLRRLVLDQAPIAVPPATPCLFLEELRRRGETFQGRTITREAIDRGLTVDPLIQALRIRETVGNLRLHERITEPDGRQRYVPRAMPELGLSHGELTAPERDTLVRALMHDPDGLAAKDGRIPYTRLRKLIGYDNSPVCFAQERDTSGGGITVNPTDPLMARWIDGWVDLPLKARSLYVRDVVARGADSAALARLLAEGAHGVPPVAAAAVPAATAAILESDIMQPGRYSVCPWAAEAILDAWANAPTEGFYDVTRGLFGFAPGEIVLEDLRRARGALLAHLPRTMAAARTPNRAAQQRGPLPAYESVIPSQLITSLRRAHKGRAADWSAADPEERNPFLRTWTGNAATDHILNQVRKTANEVITKYGNRRGWDPLPSRITVELAREAKHGVIRRNEIAKENRENEGRRKKESAALDTFCQDNTVSWQAGGLPKERAALRLRLAQRQEFFCPYCAERPKLRATDLFSPAETEIDHVIERRMGGDGPDNLVLAHKDCNNAKGKKTPHEHAGDLLDSPALAALWQGWRKENADRLKGKGHKARTPREDKDFMDRVGWRFEEDARAKAEENQERRGRRMLHDTARATRLARLYLAAAVMPEDPAEIGAPPVETPPSPEDPTGYTAIYRTISRVQPVNGSVTHMLRQRLLQRDKNRDYQTHHAEDACLLLLAGPAVVQAFNTEAAQHGADAPDDRPVDLMPTSDAYHQQRRARALGRVPLATVDAALADIVMPESDRQDPETGRVHWRLTRAGRGLKRRIDDLTRNCVILSRPRRPSETGTPGALHNATHYGRREITVDGRTDTVVTQRMNARDLVALLDNAKIVPAARLDAAAPGDTILKEICTEIADRHDRVVDPEGTHARRWISARLAALVPAHAEAVARDIAELADLDALADADRTPEQEARRSALRQSPYLGRAISAKKADGRARAREQEILTRALLDPHWGPRGLRHLIMREARAPSLVRIRANKTDAFGRPVPDAAVWVKTDGNAVSQLWRLTSVVTDDGRRIPLPKPIEKRIEISNLEYARLNGLDEGAGVTGNNAPPRPLRQDIDRLTPLWRDHGTAPGGYLGTAVGELEDKARSALRGKAMRQTLTDAGITAEAGWRLDSEGAVCDLEVAKGDTVKKDGKTYKVGVITQGIFGMPVDAAGSAPRTPEDCEKFEEQYGIKPWKAKGIPLA

SEQ ID NO: 326 - protein, 984 aa, Campylobacter coli
MARILAFDIGISSIGWAFSENDELKDCGVRIFTKAENPKTGESLALPRRLARSARKCLARRKARLNHLKHLIANEFKLNYEDYQSFDESLAKAYKGSLISPYELRFRALNELLSKQDFARVILHIAKRRGYDDIKNNGDEEKSEILKAIKQNEEKLVNYQSVGEYLYKEYFQKFKENSKEFINVRNKKESYERCIAQSFLKDELKLIFQKQREFGFSFSKKFEEEVLSVAFYKRALKDFSHLVGNCSFFTDEKRAPKNSPLAFMFVALTRIINLLNNLKNTEGILYTKDDLNALLNEVLKNGTLTYKQTKKLLGLSDDYEFKGEKGTYFIEFKKYKEFIKALGEHNLSQDDLNEIAKDITLIKDEIKLKKALAKYDLNQNQIDSLSKLEFKDHLNISFKALKLITPLMLEGKKYDEACNELNLKVAINEDKKDFLPAFNETYYKDEVTNPVVLRAIKEYRKVLNALLKKYGKVHKINIELAREVGKNHSQRAKIEKEQNENYKAKKDAELECEKLGLKINSKNILKLRLFKEQKEFCAYSGEKIKISDLQDEKMLEIDHIYPYSRSFDDSYMNKVLVFTKQNQEKLNQTPFEAFGNDSAKWQKIEVLAKNLPTKKQKRILDKNYKDKEQKNFKDRNLNDTRYIARLVLNYTKDYLDFLPLSDDENTKLNDTQKGSKVHVEAKSGMLTSALRHTWGFSAKDRNNHLHHAIDAVIIAYANNSIVKAFSDFKKEQESNSAELYAKKISELDYKNKRKFFEPFSGFRQKVLDKIDEIFVSKPERKKPSGALHEETFRKEEEFYQSYGGKEGVLKALELGKIRKVNGKIVKNGDMFRVDIFKHKKTNKFYAVPIYTMDFALKVLPNKAVARSKKGEIKDWILMDENYEFCFSLYKDSLILIQTKDMQEPEFVYYNAFTSSTVSLIVSKHDNKFETLSKNQKILFKNANEKEVIAKSIGIQNLKVFEKYIVSALGEVTKAEFRQREDFKK

SEQ ID NO: 327 - protein, 984 aa, Campylobacter coli
MARILAFDIGISSIGWAFSENDELKDCGVRIFTKAENPKTGESLALPRRLARSARKRLARRKARLNHLKHLIANEFKLNYEDYQSFDESLAKAYKGSLISPYELRFRALNELLSKQDFARVILHIAKRRGYDDIKNNGDEEKGKILKAIKQNEEKLVNYQSVGEYLYKEYFQKFKENSKEFINVRNKKESYERCITQSFLKYELKLIFQKQREFGFSFSKKFEEEVLSVAFYKRALKDFSHLVGNCSFFSDEKRAPKNSPLAFMFVALTRIINLLNNLKNTEGILYTKDDLNALLNEVLKNGTLTYKQTKKLLGLSDDYEFKGEKGTYFIEFKKYKEFIKALGEHNLSQDDLNEIAKDITLIKDEIKLKKALAKYDLNQNQIDSLSKLEFKDHLNISFKALKLITPLMLEGKKYDEACNELNLKVAINEDKKDFLPAFNETYYKDEVTNPVVLRAIKEYRKVLNALLKKYGKVHKINIELAREVGKNYSQRAKIEKEQNENYKAKKDAELECEKLGLKINSKNILKLRLFKEQKEFCAYSGEKIKISDLQDEKMLEIDHIYPYSRSFDDSYMNKVLVFTKQNQEKLNQTPFEAFGNDSAKWQKIEVLAKNLPTKKQKRILDKNYKDKEQKNFKDRNLNDTRYIARLVLNYTKDYLDFLPLSDDENTKLNDTQKGSKVHVEAKSGMLTSALRHTWGFSAKDRNNHLHHAIDAVIIAYANNSIVKAFSDFKKEQESNSAELYAKKISELDYKNKRKFFEPFSGFRQKVLDKIDEIFVSKPERKKPSGALHEETFRKEEEFYQSYGGKEGVLKALELGKIRKVNGKIVKNGDMFRVDIFKHKKTNKFYAVPIYTMDFALKVLPNKAVARSKKGEIKDWILMDENYEFCFSLYKDSLILIQTKDMQEPEFVYYNAFTSSTVSLIVSKHDNKFETLSKNQKILFKNANEKEVIAKSIGIQNLKVFEKYIVSALGEVTKAEFRQREDFKK

SEQ ID NO: 328 - protein, 984 aa, Campylobacter coli
MARILAFDIGISSIGWAFSENDELKDCGVRIFTKAENPKTGESLALPRRLARSARKRLARRKARLNHLKHLIANEFKLNYEDYQSFDESLAKAYKGSLISPYELRFRALNELLSKQDFARVILHIAKRRGYDDIKNNGDEEKSEILKAIKQNEEKLVNYQSVGEYLYKEYFQKFKENSKEFINVRNKKESYERCIAQSFLKDELKLIFQKQREFGFSFSKKFEEEVLSVAFYKRALKDFSHLVGNCSFFTDEKRAPKNSPLAFMFVALTRIINLLNNLKNTEGILYTKDDLNTLLNEVLKNGTLTYKQTKKLLGLSDDYEFKGEKGTYFIEFKKYKEFIKALGEHNLSQDNLNEIAKDITLIKDEIKLKKALAKYDLNQNQIDSLSKLEFKDHLNISFKALKLITPLMLEGKKYDEAYNELNLKVAINEDKKDFLPAFNETYYKDEVTNPVVLRAIKEYRKVLNALLKKYGKVHKINIELAREVGKNHSQRAKIEKEQNENYKAKKDAELECEKLGLKINSKNILKLRLFKEQKEFCAYSGEKIKISDLQDEKMLEIDHIYPYSRSFDDSYMNKVLVFTKQNQEKLNQTPFEAFGNDSAKWQKIEVLAKNLPTKKQKRILDKNYKDKEQKDFKDRNLNDTRYIARLVLNYTKDYLDFLPLSDDENTKLNDTQKGSKVHVEAKSGMLTSALRHTWGFSAKDRNNHLHHAIDAVIIAYANNSIVKAFSDFKKEQESNSAELYAKKISELDYKNKRKFFEPFSGFRQKVLDKIDEIFVSKPERKKPSGALHEETFRKEEEFYQSYGGKEGVLKALELGKIRKVNGKIVKNGDMFRVDIFKHKKTNKFYAVPIYTMDFALKVLPNKAVARSKKGEIKDWILMDENYEFCFSLYKDSLILIQTKDMQEPELVYFNAFTSSTVSLIVSKHDNKFETLSKNQKILFKNANEKEVIAKSIGIQNLKVFEKYIVSALGEVTKAEFRQREDFKK

SEQ ID NO: 329 - protein, 984 aa, Campylobacter coli
MARILAFDIGISSIGWAFSENDELKDCGVRIFTKAENPKTGESLALPRRLARSARKRLARRKARLNHLKHLIANEFKLNYEDYQSFDESLAKAYKGSLISPYELRFRALNELLSKQDFARVILHIAKRRGYDDIKNNGDEEKSEILKAIKQNEEKLVNYQSVGEYLYKEYFQKFKENSKEFINVRNKKESYERCIAQSFLKDELKLIFQKQREFGFSFSKKFEEEVLSVAFYKRALKDFSHLVGNCSFFTDEKRAPKNSPLAFMFVALTRIINLLNNLKNTEGILYTKDDLNALLNEVLKNGTLTYKQTKKLLGLSDDYEFKGEKGTYFIEFKKYKEFIKALGEHNLSQDDLNEIAKDITLIKDEIKLKKALAKYDLNQNQIDSLSKLEFKDHLNISFKALKLITPLMLEGKKYDEACNELNLKVAINEDKKDFLPAFNETYYKDEVTNPVVLRAIKEYRKVLNALLKKYGKVHKINIELAREVGKNYSQRAKIEKEQNENYKAKKDAELECEKLGLKINSKNILKLRLFKEQKEFCAYSGEKIKISDLQDEKMLEIDHIYPYSRSFDDSYMNKVLVFTKQNQEKLNQTPFEAFGNDSAKWQKIEVLAKNLPTKKQKRILDKNYKDKEQKNFKDRNLNDTRYIARLVLNYTKDYLDFLPLSDDENTKLNDTQKGSKVHVEAKSGMLTSALRHTWGFSAKDRNNHLHHAIDAVIIAYANNSIVKAFSDFKKEQESNSAELYAKKISELDYKNKRKFFEPFSGFRQKVLDKIDEIFVSKPERKKPSGALHEETFRKEEEFYQSYGGKEGVLKALELGKIRKVNGKIVKNGDMFRVDIFKHKKTNKFYAVPIYTMDFALKVLPNKAVARSKKGEIKDWILMDENYEFCFSLYKDSLILIQTKDMQEPEFVYYNAFTSSTVSLIVSKHDNKFETLSKNQKILFKNANEKEVIAKSIGIQNLKVFEKYIVSALGEVTKAEFRQREDFKK

SEQ ID NO: 330 - protein, 987 aa, Campylobacter coli
MARILAFDIGISSIGWAFSENDELKDCGVRIFTKAENPKTGESLALPRRLARSARKRLARRKARLNHLKHLIANEFKLNYEDYQSFDESLAKAYKGSLISPYELRFRALNELLSKQDFARVILHIAKRRGYDDIKNNGDEEKSEILKAIKQNEEKLVNYQSVGEYLYKEYFQKFKENSKEFINVRNKKESYERCIAQSFLKDELKLIFQKQREFGFSFSKKFEEEVLSVAFYKRALKDFSHLVGNCSFFTDEKRAPKNSPLAFMFVALTRIINLLNNLKNTEGILYTKDDLNTLLNEVLKNGTLTYKQTKKLLGLSDDYEFKGEKGTYFIEFKKYKEFIKALGEHNLSQDNLNEIAKDITLIKDEIKLKKALAKYDLNQNQIDSLSKLEFKDHLNISFKALKLITPLMLEGKKYDEAYNELNLKVAINEDKKDFLPAFNETYYKDEVTNPVVLRAIKEYRKVLNALLKKYGKVHKINIELAREVGKNHSQRAKIEKEQNENYKAKKDAELECEKLGLKINSKNILKLRLFKEQKEFCAYSGEKIKISDLQDEKMLEIDHIYPYSRSFDDSYMNKVLVFTKQNQEKLNQTPFEAFGNDSAKWQKIEVLAKNLPTKKQKRILDKNYKDKEQKDFKDRNLNDTRYIARLVLNYTKDYLDFLPLSDDENTKLNDTQKGSKVHVEAKSGMLTSALRHTWGFSAKDRNNHLHHAIDAVIIAYANNSIVKAFSDFKKEQESNSAELYAKKISELDYKNKRKFFEPFSGFRQKVLDKIDEIFVSKPERKKPSGALHEETFRKEEEFYQSYGGKEGVLKALELGKIRKVNGKIVKNGDMFRVDIFKHKKTNKFYAVPIYTMDFALKVLPNKAVARSKKGEIKDWILMDENYEFCFSLYKDSLILIQTKDMQEPELVYFNAFTSSTVSLIVSKHDNKFETLSKNQKILFKNANEKEVIAKSIGIQNLKVFEKYIVSALGEVTKAEFRQREDFKNELR

SEQ ID NO: 331 - protein, 984 aa, Campylobacter coli
MARILAFDIGISSIGWAFSENDELKDCGVRIFTKAENPKTGESLALPRRLARSARKRLARRKARLNHLKHLIANEFKLNYEDYQSFDESLAKAYKGSLISPYELRFRALNELLSKQDFARVILHIAKRRGYDDIKNNGDEEKSEILKAIKQNEEKLVNYQSVGEYLYKEYFQKFKENSKEFINVRNKKESYERCIAQSFLKDELKLIFQKQREFGFSFSKKFEEEVLSVAFYKRALKDFSHLVGNCSFFTDEKRAPKNSPLAFMFVALTRIINLLNNLKNTEGILYTKDDLNTLLNEVLKNGTLTYKQTKKLLGLSDDYEFKGEKGTYFIEFKKYKEFIKALGEHNLSQDNLNEIAKDITLIKDEIKLKKALAKYDLNQNQIDSLSKLEFKDHLNISFKALKLITPLMLEGKKYDEAYNELNLKVAINEDKKDFLPAFNETYYKDEVTNPVVLRAIKEYRKVLNALLKKYGKVHKINIELAREVGKNHSQRAKIEKEQNENYKAKKDAELECEKLGLKINSKNILKLRLFKEQKEFCAYSGEKIKISDLQDEKMLEIDHIYPYSRSFDDSYMNKVLVFTKQNQEKLNQTPFEAFGNDSAKWQKIEVLAKNLPTKKQKRILDKNYKDKEQKDFKDRNLNDTRYIARLVLNYTKDYLDFLPLSNDENTKLNDTQKGSKVHVEAKSGMLTSALRHTWGFSAKDRNNHLHHAIDAVIIAYANNSIVKAFSDFKKEQESNSAELYAKKISELDYKNKRKFFEPFSGFRQKVLDKIDEIFVSKPERKKPSGALHEETFRKEEEFYQSYGGKEGVLKALELGKIRKVNGKIVKNGDMFRVDIFKHKKTNKFYAVPIYTMDFALKVLPNKAVARSKKGEIKDWILMDENYEFCFSLYKDSLILIQTKDMQEPELVYFNAFTSSTVSLIVSKHDNKFETLSKNQKILFKNANEKEVIAKSIGIQNLKVFEKYIVSALGEVTKAEFRQREDFKK

SEQ ID NO: 332 - protein, 987 aa, Campylobacter coli
MARILAFDIGISSIGWAFSENDELKDCGVRIFTKAENPKTGESLALPRRLARSARKRLARRKARLNHLKHLIANEFKLNYEDYQSFDESLAKAYKGSLISPYELRFRALNELLSKQDFARVILHIAKRRGYDDIKNSDDKEKGAILKAIKQNEEKLANYQSVGEYLYKEYFQKFKENSKEFTNVRNKKESYERCIAQSFLKDELKLIFKKQREFGFSFSKKFEEEVLSVAFYKRALKDFSHLVGNCSFFTDEKRAPKNSPLAFMFVALTRIINLLNNLKNTEGILYTKDDLNALLNEVLKNGTLTYKQTKKLLGLSDDYEFKGEKGTYFIEFKKYKEFIKALGDHSLSQDDLNEIAKDITLIKDEIKLKKALAKYDLNQNQIDSLSKLEFKDHLNISFKALKLITPLMLEGKKYDEACNELNLKVAINEDKKDFLPAFNETYYKDEVTNPVVLRAIKEYRKVLNALLKKYGKVHKINIELAREVGKNYSQRAKIEKEQNENYKAKKDAELECEKLGLKINSKNILKLRLFKEQKEFCAYSGEKIKISDLQDEKMLEIDHIYPYSRSFDDSYMNKVLVFTKQNQEKLNKTPFEAFGNDSTKWQKIEVLAKNLPEKKQKRILDKNYKDKEQKDFKDRNLNDTRYIARLVLNYTKDYLDFLPLSDDENTKLNDTQKGSKVHVEAKSGMLTSALRHTWGFSTKDRNNHLHHAIDAVIIAYANNSIVKAFSDFKKEQESNSAELYAKKISELDYKNKRKFFEPFSGFRQKVLDKIDEIFVSKPERKKPSGALHEETFRKEEEFYQSYGGKEGVLKALELGKIRKVNGKIVKNGDMFRVDIFKHKKTNKFYAVPIYTMDFALKVLPNKAVARSKKGEIKDWILMDENYEFCFSLYKDSLILIQTKDMQEPEFVYYNAFTSSTVSLIVSKHDNKFETLSKNQKILFKNANEKEVIAKSIGIQNLKVFEKYIVSALGEVTKAEFRQREDFKNELR

SEQ ID NO: 333 - protein, 984 aa, Campylobacter coli
MARILAFDIGISSIGWAFSENDELKDCGVRIFTKAENPKTGESLALPRRLARSARKRLARRKARLNHLKHLIANEFKLNYEDYQSFDESLAKAYKGSLISPYELRFRALNELLSKQDFARVILHIAKRRGYDDIKNSDDKEKGAILKAIKQNEEKLTNYQSVGEYLYKEYFQKFKENSKEFTNVRNKKESYERCIAQSFLKDELKLIFKKQREFGFSFSKKFEEEVLSVAFYKRALKDFSHLVGNCSFFTDEKRAPKNSPLAFMFVALTRIINLLNNLKNTEGILYTKDDLNALLNEVLKNGTLTYKQTKKLLGLSDDYEFKGEKGTYFIEFKKYKEFIKALGDHSLSQDDLNEIAKDITLIKDEIKLKKALAKYDLNQNQIDSLSKLEFKDHLNISFKALKLITPLMLEGKKYDEACNELNLKVAINEDKKDFLPAFNETYYKDEVTNPVVLRAIKEYRKVLNALLKKYGKVHKINIELAREVGKNYSQRAKIEKEQNENYKAKKDAELECEKLGLKINSKNILKLRLFKEQKEFCAYSGEKIKISDLQDEKMLEIDHIYPYSRSFDDSYMNKVLVFTKQNQEKLNQTPFEAFGNDSAKWQKIEVLAKNLPTKKQKRILDKNYKDKEQKDFKDRNLNDTRYIARLVLNYTKDYLDFLPLSDDENTKLNDTQKGSKVHVEAKSGMLTSALRHTWGFSAKDRNNHLHHAIDAVIIAYANNSIVKAFSDFKKEQESNSAELYAKKISELDYKNKRKFFEPFSGFRQKVLDKIDEIFVSKPERKKPSGALHEETFRKEEEFYQSYGGKEGVLKALELGKIRKVNGKIVKNGDMFRVDIFKHKKTNKFYAVPIYTMDFALKVLPNKAVARSKKGEIKDWILMDENYEFCFSLYKDSLILIQTKDMQEPEFVYYNAFTSSTVSLIVSKHDNKFETLSKNQKILFKNANEKEVIAKSIGIQNLKVFEKYIVSALGEVTKAEFRQREDFKK

SEQ ID NO: 334 - protein, 965 aa, Campylobacter coli
MKIIGFNLGIANIGWALRENDEIIDCGVRVFDIPENPKNGNSLALERRENKARMKIVKRKKARMLATKTFLKKELNVDLSKLFLIGSTQSIYELRTKALSSLISKEELSAIILHIAKHRGYDDSALKNENGTIIEALNKNKEAMLKFKSVGEYFYKNFVQNKEVKKIRNTTEDYSNSVPRSLLKQELDLILDKQKELGLIKNADFKAKLFEIIFFKRPLKDFSNKIGNCIFFENEKRAAKNTISACEFVALGKVVNLLKSIEKDIGIVYEKDSINEIMSIILDKTSISYKKIRDILNLPQDINFKGLDYSKNNVENSKLVDLKKLNEFKKALGDGFTNLDKDILDSIATDITLTKDTATLKEKLKNYNVLNAEQIEKLSELVFNDHINLSLKALKQIIPLMYEGKRYDEACELCNFTIAKNQEKNEYLPLFEKTRFAKDISSPVVIRAICEFRKLLNDIIRRYGSVHKIHLELTRDFGISFNDRKKIIKEIEQNEQSRIKALETIKELKLEETSKNIQIVRLFEDQKGICPYSGLKMDLKCLDELVIDYIRPYNRSLDDSYSNKVLTFKKLNDLKQGKTPFEAFGEDEKLWAEINERIKEYNGKKRFKIFDKFFKDKKPFDFTEQTLQDTRWLTKLVASYLNEYLSFLPISEDENTALGYGEKGSKQHVILSSGMITQMLRNFWYLGFKNHKDYKNNAMDAIIVAFTTNSIIFTFNNFKKELDLAKAEFYANKISESDYLLKRKFLPPFSGFKEQALEKVKNIFVSHSLKIKNKGTLHELTPLKIKELKNTYGDLDLAVKLGKIRKYNDKYYANAKGSLVRTDLFADKENKFHAVSIYKADFSTKKLPNKTPATTSNGETKEGIEMNENYNFCMSLYKNTPISVKIKGMKEPIICYYHGFNTSGSKITYKKHDNNYHNLSEDEMVVFRKNDKESIVVGKILEIKKYSISPSGELSLIENEERKWF

SEQ ID NO: 335 - protein, 965 aa, Campylobacter coli
MKIIGFNLGIANIGWALRENDEIIDCGVRVFDIPENPKNGNSLALERRENKARMKIVKRKKARMLATKTFLKKELNVDLSKLFLIGSTQSIYELRTKALSSLISKEELSAIILHIAKHRGYDDSALKNENGTIIEALNKNKEAMLKFKSVGEYFYKNFVQNKEVKKIRNTTEDYSNSVPRSLLKQELDLILDKQKELGLIKNADFKAKLFEIIFFKRPLKDFSNKIGNCIFFENEKRAAKNTISACEFVALGKVVNLLKSIEKDIGIVYEKDSINEIMSIILDKTSISYKKIRDILNLPQDINFKGLDYSKNNAENSKLVDLKKLNEFKKALGDGFANLDKDILDSIATDITLTKDTATLKEKLKNYNVLNAEQIEKLSELVFNDHINLSLKALKQIIPLMYEGKRYDEACELCNFTIAKNQEKNEYLPLFEKTRFAKDISSPVVIRAICEFRKLLNDIIRRYGSVHKIHLELTRDFGISFNDRKKIIKEIEQNEQSRIKALETIKELKLEETSKNIQIVRLFEDQKGICPYSGLKMDLKCLDELVIDYIRPYNRSLDDSYSNKVLTFKKLNDLKQGKTPFEAFGEDEKLWAEINERIKEYNGKKRFKIFDKFFKDKKPFDFTEQTLQDTRWLTKLVASYLNEYLSFLPISEDENTALGYGEKGSKQHVVLSSGMITQMLRNFWYLGFKNHKNYKNNAMDAIIVAFTTNSIIFAFNNFKKELDLAKAEFYANKISESDYLLKRKFLPPFSGFKEQALEKVKNIFVSHSLKIKNKGTLHELTPLKIKELKNTYGDLDLAVKLGKIRKYNDKYYANTKGSLVRTDLFVDKENKFHAVSIYKADFSTKKLPNKTPATTSNGETKEGIEMNENYNFCMSLYKNTPVSVKIKGMKEPIICYYHGFNTSGSKITYKKHDNNYHNLSEDEMVVFRKNDKESIVVGKILEIKKYSISPSGELSLIENEKRKWF

SEQ ID NO: 336 - protein, 965 aa, Campylobacter coli
MKIIGFNLGIANIGWALRENDEIIDCGVRVFDIPENPKNGNSLALERRENKARMKIVKRKKARMLATKTFLKKELNVDLSKLFLIGSTQSIYELRTKALSSLISKEELSAIILHIAKHRGYDDSALKNENGTIIEALNKNKEAMLKFKSVGEYFYKNFVQNKEVKKIRNTTEDYSNSVPRSLLKQELDLILDKQKELGLIKNADFKEKLFEIIFFKRPLKDFSNKIGNCIFFENEKRAAKNTISACEFVALGKVVNLLKSIEKDIGIVYEKDSINEIMSIILDKTSISYKKIRDILNLPQDINFKGLDYSKNNAENSKLVDLKKLNEFKKALGDGFANLDKDILDSIATDITLTKDTATLKEKLKNYNVLNAEQIEKLSELVFNDHINLSLKALKQIIPLMYEGKRYDEACELCNFTIAKNQEKNEYLPLFEKTRFAKDISSPVVIRAICEFRKLLNDIIRRYGSVHKIHLELTRDFGISFNDRKKIIKEIEQNEQSRIKALETIKELKLEETSKNIQIVRLFEDQKGICPYSGLKMDLKCLDELVIDYIRPYNRSLDDSYSNKILTFKKLNDLKQGKTPFEAFGEDEKLWAEINERIKEYNGKKRFKIFDKFFKDKKPFDFTEQTLQDTRWLTKLVASYLNEYLLFLPINEDENTALGYGEKGSKQHVVLSSGMITQMLRNFWYLGFKNHKDYKNNAMDAIIVAFTTNSIIFAFNNFKKELDLAKAEFYANKISESDYLLKRKFLPPFSGFKEQALEKVKNIFVSHSLKIKNKGTLHELTPLKIKELKNTYGDLDLAVKLGKIRKYNDKYYANAKGSLVRTDLFADKENKFHAVSIYKADFSTKKLPNKTPATTSNGETKEGIEMNENYNFCMSLYKNTPISVKIKGMKEPIICYYHGFNTSGSKITYKKHDNNYHNLSEDEMVVFRKNDKESIVVGKILEIKKYSISPSGELSLIENEERKWF

SEQ ID NO: 337 - protein, 933 aa, Campylobacter coli
MKIIGFNLGIANIGWALRENDEIIDCGVRVFDIPENPKNGNSLALERRENKARMKIVKRKKARMLATKTFLKKELNVDLSKLFLIGSTQSIYELRTKALSSLISKEELSVIILHIAKHRGYDDSALKNENGTIIEALNKNKETMLKFKSVGEYFYKNFVQNKEVKKIRNTTEDYSNSVPRSLLKQELDLILDRQKELGLIKNADFKAKLFEIIFFKRPLKDFSNKIGNCIFFENEKRAAKNTISACEFVALGKVVNLLKSIEKDIGIVYEKDSINEIMSIILDKTSISYKKIRDILNLPQDINFKGLDYSKNNVENSKLVDLKKLNEFKKALGDGFTNLDKDILDSIATDITLTKDTATLKEKLKNYNVLNAEQIEKLSELVFNDHINLSLKALKQIIPLMYEGKRYDEACELCNFTIAKNQEKNEYLPLFEKTRFAKDISSPVVIRAICEFRKLLNDIIRRYGSVHKIHLELTRDFGISFNDRKKIIKEIEQNEQSRIKALETIKELKLEETSKNIQIVRLFEDQKGICPYSGLKMDLKCLDELVIDYIRPYNRSLDDSYSNKVLTFKKLNDLKQGKTPFEAFGEDEKLWAEINERIKEYNGKKRFKIFDKFFKDKKPFDFTEQTLQDTRWLTKLVASYLNEHLSFLPISEDENTALGYGEKGSKQHVILSSGMITQMLRNFWYLGFKNHKDYKNNAMDAIIVAFTTNSIIFTFNNFKKELDLAKAEFYANKISESDYLLKRKFLPPFSGFKEQALEKVKNIFVSHSLKIKNKGTLHELTPLKIKELKNTYGDLDLAVKLGKIRKYNDKYYANANGSLVRSDLFIDKKNKFHAVPIYKADFSTKKLPNKTPATTSNGETKEGIEMNENYNFCMSLYKNTPISVKIKGMKESIICYYHGFNTSGSKITYKKHDNNYHNLSEDEMVVFRKNDKE

SEQ ID NO: 338 - protein, 666 aa, Campylobacter jejuni
KGEKGTYFIEFKKYKEFIKALDEHSLSQDDLNEIAKDITLIKDEIKLKKALAKYDLKENQIDSLSKLEFKDHLNISFKALKLITPLMLEGKKYDEACNELNLKVAINEDKKDFLPAFNETYYKDEVTNPVVLRAIKEYRKILNALLKKYGKVHKINIELAREVGKNHSQRAKIEKEQNENYKAKKDAELECEKLGLKINSKNILKLRLFKEQKEFCVYSGEKIKLSDLQDEKMLEIDHIYPYSRSFDDSYMNKVLVFAKQNQEKLNKTPFEAFGNDSTKWQKIEVLTKNLPTKKQKRILDKNYKDKEQKDFKDRNLNDTRYIARLVLNYTKDYLDFLPLSDDENTKLNDTQKGSKVHVEAKSGMLTSALRHTWGFSTKDRNNHLHHAIDAAIIAYANNSIVKAFSDFKKEQESNSAELYAKKISELDYKNKRKFFEPFSGFRQKVLDKIDEIFVSKPERKKPSGALHEETFRKEEEFYQSYGGKEGVLKALELGKIRKVNGKIVKNGDMFRVDIFKHKKTNKFYAVPIYTMDFALKVLPNKAVARSKKGEIKDWILMDEDYEFCFSLYKDSLILIQTKDMQEPELVYFNAFTSSTVSLIVSKHDNKFETLSKNQKILFKNANEKEVIAKSIGIQNLKVFEKYIVSALGEVTKAEFRQREDFKNELR

SEQ ID NO: 339 - protein, 190 aa, Campylobacter jejuni
MAFDIGISSIGWAFSENDELKDCGVRIFTKVENPKTGESLALPRRLARSARKRLARRKARLNHLKHLIANEFKLNYEDYQSFDESLAKAYKGSLISPYELRFRALNELLSKQDFARVILHIAKRRGYDDIKNSDDKEKGAILKAIKQNEEKLANYQSVGEYLYKEYFQKFKENSKEFTNVRNKKKVMNAA

SEQ ID NO: 340 - protein, 985 aa, Campylobacter jejuni
MAKILAFDIGISSIGWAFVENDELKDCGVRIFTKAENPKTGESLALPRRLARSARKRLARRKARLNHLKHLIANEFKLNYEDYQSFDESLAKAYKGTLISPYELRFKALNELLSKQDLARVILHIAKRRGYDNIKNSDDKEKGAILKAVKENEEKLANYKSVGEYLYKEYFQKFKENSKEFINVRNKKESYERCIAQSFLKDELKLIFQKQREFGFNFSKKFEEEVLSVAFYKRALKDFSHLVGNCSFFVDEKRAPKNSPLAFEFVALTRIVNLLNNLNKNNSYIKDDLNALLSEVLKNGTLTYKQTKKILGLSDDYEFKGQKGNYFIEFKKYKEFIKALCEHNLNQDDLNEIAKDITLVKDETKLKKALAKYDLNQNQIENLSKIEFKDHLNISFKALKLIVPLMREGKKYDEVCNELNLKTAINEDKKEFLPAFNETYYKDEVNNPVVLRAIKEYRKVLNSLLKKYGKVHKINIELAREVGKNHRERSKIEKEQNENFKAKKDAELECEKLGLKINSKNILKLRLFKEQKEFCVYSGEKIKISDLQDEKMLEIDHIYPYSRSFDDSYMNKVLVFTKQNQEKLNKTPFEAFGKDDVKWQKIETLAKNLPAKKQKRILDKNYKDKEQKDFKDRNLNDTRYIARLVLNYTKDYLEFLPLSDDENIKLNDTQKGSKVHVEAKSGMLTSVLRHTWGFSTKDRNNHLHHAIDAVIIAYANASVVKAFSDFKKEQENYTAELYAKKINELDFKNKRKFFEPFSNFRQKVLEKIDEIFVSKPERKKPSGALHEETFYKEEEFYKEYGGKEGVLKALELGKIRKVNGKIVSNANMFRVDIFKYKKTNKFYAVPIYTMDFALGILPNKAVVGGKDKQGIIKDWLLMDENYEFCFSLYKDSLILLQTKDMQEPELVYFKSFKSSTAGLVVSKHDNKFENLNENQKKLFKSANEKKVVAEGIGIQNLKVFEKYIVSALGEITKAEIKERENFKKK

SEQ ID NO: 341 - protein, 987 aa, Campylobacter jejuni
MARILAFDIGISSIGWAFSENDELKDCGVRIFTKAENPKTGESLALPRCLARSARKRLARRKARLNHLKHLIANEFKLNYEDYQSFDESLAKAYKGSLISPYELRFRALNELLSKQDFARVILHIAKRRGYDDIKNNGDEEKGEILKAIKQNEEKLVSYQSVGEYLYKEYFQKFKENSKEFINVRNKKESYERCIAQSFLKDELKLIFQKQRKFGFSFSKKFEEEVLSVAFYKRALKDFSHLVGNCSFFTDEKRAPKNSPLAFMFVALTRIINLLNNLKNTEGILYTKDDLNTLLNEVLKNGTLTYKQTKKLLGLSNDYEFKGEKGTYFIEFQKYKEFVKALGEHNLSQDDLNEIAKDITLIKDEIKLKKALAKYDLNQNQIDSLSKLEFKDHLNISFKALKLITPLMLEGKKYDEACNELNLKVAINEDKKDFLPAFNETYYKDEVTNPVVLRAIKEYRKVLNALLKKYGKVHKINIELAREVGKNHSQRAKIEKEQNENYKAKKDAELECEKLGLKINSKNILKLRLFKEQKEFCVYSGEKIKISDLQDEKMLEIDHIYPYSRSFDDSYMNKVLVFTKQNQEKLNKTPFETFGNDRVKWQKIEVLAKNLPTKKQKRILDKNYKDKEQKDFKDRNLNDTRYIARLVLNYTKDYLDFLPLSDDENTKLNDTQKGSKVHVEAKSGMLTSTLRHTWGFSTKDRNNHLHHAIDAAIIAYANNSIVKAFSDFKKEQESNTAELYAKKISELDYKNKRKFFEPFSGFRQKLLDKIDEIFVSKPERKKPSGALHEETFRKEEEFYQSYGGKEGVLKALELGKIRKVNGKIVSNGDMFRVDIFKHKKTNKFYAVPIYTMDFALKVLPNKAVVQGKDKKSGLIKDWILMDENYEFCFSLYKDSLILIQTKDMQEPELVYYERLDSSNASLTVSKHDNKFETLSKNQKILFKNANEKEVIAKSIGIQNLKVFEKYIVSALGEVTKAEFRQREDFKK

SEQ ID NO: 342 - protein, 987 aa, Campylobacter jejuni
MARILAFDIGISSIGWAFSENDELKDCGVRIFTKAENPKTGESLALPRRLARSARKRLARRKARLNHLKHLIANEFKLNYEDYQSFDEGLAKAYKGSLISPYELRFRALNELLSKQDFARVILHIAKRRGYDDIKNNGDEEKSEILKAIKQNEEKLVNYQSVGEYLYKEYFQKFKENSKEFINVRNKKESYERCIAQSFLKDELKLIFQKQREFGFSFSKKFEEEVLSVAFYKRALKDFSHLVGNCSFFTDEKRAPKNSPLAFMFVALTRIINLLNNLKNTEGILYTKDDLNTLLNEVLKNGTLTYKQTKKLLGLSDDYEFKGEKGTYFIEFKKYKEFIKALGEHNLSQDNLNEIAKDITLIKDEIKLKKALAKYDLNQNQIDSLSKLEFKDHLNISFKALKLITPLMLEGKKYDEAYNELNLKVAINEDKKDFLPAFNETYYKDEVTNPVVLRAIKEYRKVLNALLKKYGKVHKINIELAREVGKNHSQRAKIEKEQNENYKAKKDAELECEKLGLKINSKNILKLRLFKEQKEFCAYSGEKIKISDLQDEKMLEIDHIYPYSRSFDDSYMNKVLVFTKQNQEKLNQTPFEAFGNDSAKWQKIEVLAKNLPTKKQKRILDKNYKDKEQKDFKDRNLNDTRYIARLVLNYTKDYLDFLPLSDDENTKLNDTQKGSKVHVEAKSGMLTSALRHTWGFSAKDRNNHLHHAIDAVIIAYANNSIVKAFSDFKKEQESNSAELYAKKISELDYKNKRKFFEPFSGFRQKVLDKIDEIFVSKPERKKPSGALHEETFRKEEEFYQSYGGKEGVLKALELGKIRKVNGKIVKNGDMFRVDIFKHKKTNKFYAVPIYTMDFALKVLPNKAVVQGKDKKSGLIKDWILMDENYEFCFSLYKDSLILIQTKDMQEPELVYFNAFTSSTVSLIVSKHDNKFETLSKNQKILFKNANEKEVIAKSIGIQNLKVFEKYIVSALGEVTKAEFRQREDFKK

SEQ ID NO: 343 - protein, 961 aa, Campylobacter jejuni
MARILAFDIGISSIGWAFSENDELKDCGVRIFTKAENPKTGESLALPRRLARSARKRLARRKARLNHLKHLIANEFKLNYEDYQSFDESLAKAYKGSLISPYELRFRALNELLSKQDFARVILHIAKRRGYDDIKNNGDEEKGKILKAIKQNEEKLVNYQSVGEYLYKEYFQKFKENSKEFINVRNKKESYERCITQSFLKYELKLIFQKQREFGFSFSKKFEEEVLSVAFYKRALKDFSHLVGNCSFFSDEKRAPKNSPLAFMFVALTRIINLLNNLKNTEGILYTKDDLNALLNEVLKNGTLTYKQTKKLLGLSDDYEFKGEKGTYFIEFKKYKEFIKALGEHNLSQDDLNEIAKDITLIKDEIKLKKALAKYDLNQNQIDSLSKLEFKDHLNIGFKALKLITPLMLEGKKYDEACNELNLKVAINEDKKDFLPAFNETYYKDEVTNPVVLRAIKEYRKVLNALLKKYGKVHKINIELAREVGKNHSQRAKIEKEQNENYKAKKDAELECEKLGLKINSKNILKLRLFKEQKEFCAYSGEKIKLSDLQDEKMLEIDHIYPYSRSFDDSYMNKVLVFTKQNQEKLNKTPFEAFGNDNVKWQKIEVLAKNLPEKKQKRILDKNYKDKEQKDFKDRNLNDTRYIARLVLNYTKDYLDFLPLSDDENTKLKGSKVHVEAKSGMLTSALRHTWGFSTKDRNNHLHHAIDAAIIAYANNSIVKDFSDFKKEQESNSAELYAKKISELDYKNKRKFFEPFSGFRQKVLDKIDEIFVSKPERKKPSGALHEETFRKEEEFYQSYGGKEGVLKALELGKIRKVNGKIVKNGDMFRVDIFKHKKTNKFYAVPIYTMDFALKVLPNKAVARSKKGEIKDWILMDENYEFCFSLYKDSLILIQTKDMQEPELVYFNAFTSSTVSLIVSKHDNKFETLSKNLKVFEKYIVSALGEVTKAEFRQREDFKNELR

SEQ ID NO: 344 - protein, 984 aa, Campylobacter jejuni
MARILAFDIGISSIGWAFSENDELKDCGVRIFTKAENPKTGESLALPRRLARSARKRLARRKARLNHLKHLIANEFKLNYEDYQSFDESLAKAYKGSLISPYELRFRALNELLSKQDFARVILHIAKRRGYDDIKNNGDEEKGKILKAIKQNEEKLVNYQSVGEYLYKEYFQKFKENSKEFINVRNKKESYERCITQSFLKYELKLIFQKQREFGFSFSKKFEEEVLSVAFYKRALKDFSHLVGNCSFFTDEKRAPKNSPLAFMFVALTRIINILNNLKNTEGILYTKDDLNALLNEVLKNGTLTYKQTKKLLGLSDDYEFKGEKGTYFIEFKKYKEFIKALGEHNLSQDDLNEIAKDITLIKDEIKLKKALAKYDLNQNQIDSLSKLEFKDHLNISFKALKLITPLMLEGKKYDEACNELNLKVAINEDKKDFLPAFNETYYKDEVTNPVVLRAIKEYRKILNALLKKYGKVHKINIELAREVGKNHSQRAKIEKEQNENYKAKKDAEIECEKLGLKINSKNILKLRLFKEQKEFCAYSGEKIKISDLQDEKMLEIDHIYPYSRSFDDSYMNKVLVFTKQNQEKLNQTPFEAFGNDSAKWQKIEVLAKNLPTKKQKRILDKNYKDKEQKDFKDRNLNDTRYIARLVLNYTKDYLDFLPLSDDENTKLNDTQKGSKVHVEAKSGMLTSALRHTWGFSAKDRNNHLHHAIDAVIIAYANNSIVKAFSDFKKEQESNSAELYAKKISELDYKNKRKFFEPFSGFRQKVLDKIDEIFVSKPERKKPSGALHEETFRKEEEFYQSYGGKEGVLKALELGKIRKVNGKIVKNGDMFRVDIFKHKKTNKFYAVPIYTMDFALKVLPNKAVARSKKGEIKDWILMDENYEFCFSLYKDSLILIQTKDMQEPEFVYYNAFTSSTVSLIVSKHDNKFETLSKNQKILFKNANEKEVIAKSIGIQNLKVFEKYIVSALGEVTKAEFRQREDFKK

SEQ ID NO: 345 - protein, 987 aa, Campylobacter jejuni
MARILAFDIGISSIGWAFSENDELKDCGVRIFTKAENPKTGESLALPRRLARSARKRLARRKARLNHLKHLIANEFKLNYEDYQSFDESLAKAYKGSLISPYELRFRALNELLSKQDFARVILHIAKRRGYDDIKNNGDEEKGKILKAIKQNEEKLVSYQSVGEYLYKEYFQKFKENSKEFINVRNKKESYERCIAQSFLKDELKLIFQKQREFGFSFSKKFEEEVLSVAFYKRALKDFSHLVGNCSFLLMKKERQKNSPLAFMFVALTRIINLLNNLKNTEGILYTKDDLNTLLNEALKNGTLTYKQTKKLLGLSNDYEFKGEKGTYFIEFQKYKEFVKALGEHNLSQDDLNEIAKDITLIKDEIKLKKALAKYDLNQNQIDSLSKLEFKDHLNISFKALKLITPLMLEGKKYDEACNELNLKVAINEDKKDFLPAFNETYYKDEVTNPVVLRAIKEYRKVLNALLKKYGKVHKINIELAREVGKNHSQRAKIEKEQNENYKAKKDAELECEKLGLKINSKNILKLRLFKEQKEFCVYSGEKIKISDLQDEKMLEIDHIYPYSRSFDDSYMNKVLVFTKQNQEKLNKTPFETFGNDRVKWQKIEVLAKNLPTKKQKRILDKNYKDKEQKDFKDRNLNDTRYIARLVLNYTKDYLDFLPLSDDENTKLNDTQKGSKVHVEAKSGMLTSTLRHTWGFSTKDRNNHLHHAIDAAIIAYANNSIVKAFSDFKKEQESNTAELYAKKISELDYKNKRKFFEPFSGFRQKLLDKIDEIFVSKPERKKPSGALHEETFRKEEEFYQSYGGKEGVLKALELGKIRKVNGKMVKNGDMFRVDIFKHKKTNKFYAVPIYTMDFALKVLPNKAVVQGKDKKSGLIKDWILMDENYEFCFSLYKDSLILIQTKDMQEPELVYYERLDSSNASLTVSKHDNKFETLSKNQKILFKNANEKEVIAKSIGIQNLKVFEKYIVSALGEVTKAEFRQREDFKK

SEQ ID NO: 346 - protein, 987 aa, Campylobacter jejuni
MARILAFDIGISSIGWAFSENDELKDCGVRIFTKAENPKTGESLALPRRLARSARKRLARRKARLNHLKHLIANEFKLNYEDYQSFDESLAKAYKGSLISPYELRFRALNELLSKQDFARVILHIAKRRGYDDIKNNGDEEKSEILKAIKQNEEKLVNYQSVGEYLYKEYFQKFKENSKEFINVRNKKESYERCIAQSFLKDELKLIFQKQREFGFSFSKKFEEEVLSVAFYKRALKDFSHLVGNCSFFTDEKRAPKNSPLAFMFVALTRIINLLNNLKNTEGILYTKDDLNTLLNEVLKNGTLTYKQTKKLLGLSDDYEFKGEKGTYFIEFKKYKEFIKALGEHNLSQDNLNEIAKDITLIKDEIKLKKALAKYDLNQNQIDSLSKLEFKDHLNISFKALKLITPLMLEGKKYDEAYNELNLKVAINEDKKDFLPAFNETYYKDEVTNPVVLRAIKEYRKVLNALLKKYGKVHKINIELAREVGKNHSQRAKIEKEQNENYKAKKDAELECEKLGLKINSKNILKLRLFKEQKEFCAYSGEKIKISDLQDEKMLEIDHIYPYSRSFDDSYMNKVLVFTKQNQEKLNQTPFEAFGNDSAKWQKIEVLAKNLPTKKQKRILDKNYKDKEQKDFKDRNLNDTRYIARLVLNYTKDYLDFLPLSDDENTKLNDTQKGSKVHVEAKSGMLTSALRHTWGFSAKDRNNHLHHAIDAVIIAYANNSIVKAFSDFKKEQESNSAELYAKKISELDYKNKRKFFEPFSGFRQKVLDKIDEIFVSKPERKKPSGALHEETFRKEEEFYQSYGGKEGVLKALELGKIRKVNGKIVKNGDMFRVDIFKHKKTNKFYPVPIYTMDFALKVLPNKAVVQGKDKKSGLIKDWILMDENYEFCFSLYKDSLILIQTKDMQEPELVYFNAFTSSTVSLIVSKHDNKFETLSKNQKILFKNANEKEVIAKSIGIQNLKVFEKYIVSALGEVTKAEFRQREDFKK

SEQ ID NO: 347 - protein, 987 aa, Campylobacter jejuni
MARILAFDIGISSIGWAFSENDELKDCGVRIFTKAENPKTGESLALPRRLARSARKRLARRKARLNHLKHLIANEFKLNYEDYQSFDESLAKAYKGSLISPYELRFRALNELLSKQDFARVILHIAKRRGYDDIKNNGDEEKSEILKAIKQNEEKLVNYQSVGEYLYKEYFQKFKENSKEFINVRNKKESYERCIAQSFLKDELKLIFQKQREFGFSFSKKFEEEVLSVAFYKRALKDFSHLVGNCSFFTDEKRAPKNSPLAFMFVALTRIINLLNNLKNTEGILYTKDDLNTLLNEVLKNGTLTYKQTKKLLGLSDDYEFKGEKGTYFIEFKKYKEFIKALGEHNLSQDNLNEIAKDITLIKDEIKLKKALAKYDLNQNQIDSLSKLEFKDHLNISFKALKLITPLMLEGKKYDEAYNELNLKVAINEDKKDFLPAFNETYYKDEVTNPVVLRAIKEYRKVLNALLKKYGKVHKINIELAREVGKNHSQRAKIEKEQNENYKAKKDAELECEKLGLKINSKNILKLRLFKEQKEFCAYSGEKIKISDLQDEKMLEIDHIYPYSRSFDDSYMNKVLVFTKQNQEKLNQTPFEAFGNDSAKWQKIEVLAKNLPTKKQKRILDKNYKDKEQKDFKDRNLNDTRYIARLVLNYTKDYLDFLPLSDDENTKLNDTQKGSKVHVEAKSGMLTSALRHTWGFSAKDRNNHLHHAIDAVIIAYANNSIVKAFSDFKKEQESNSAELYAKKISELDYKNKRKFFEPFSGFRQKVLDKIDEIFVSKPERKKPSGALHEETFRKEEEFHQSYGGKEGVLKALELGKIRKVNGKIVKNGDMFRVDIFKHKKTNKFYAVPIYTMDFALKVLPNKAVVQGKDKKSGLIKDWILMDENYEFCFSLYKDSLILIQTKDMQEPELVYFNAFTSSTVSLIVSKHDNKFETLSKNQKILFKNANEKEVIAKSIGIQNLKVFEKYIVSALGEVTKAEFRQREDFKK

SEQ ID NO: 348 - protein, 987 aa, Campylobacter jejuni
MARILAFDIGISSIGWAFSENDELKDCGVRIFTKAENPKTGESLALPRRLARSARKRLARRKARLNHLKHLIANEFKLNYEDYQSFDESLAKAYKGSLISPYELRFRALNELLSKQDFARVILHIAKRRGYDDIKNNGDEEKSEILKAIKQNEEKLVNYQSVGEYLYKEYFQKFKENSKEFINVRNKKESYERCIAQSFLKDELKLIFQKQREFGFSFSKKFEEEVLSVAFYKRALKDFSHLVGNCSFFTDEKRAPKNSPLAFMFVALTRIINLLNNLKNTEGILYTKDDLNTLLNEVLKNGTLTYKQTKKLLGLSDDYEFKGEKGTYFIEFKKYKEFIKALGEHNLSQDNLNEIAKDITLIKDEIKLKKALAKYDLNQNQIDSLSKLEFKDHLNISFKALKLITPLMLEGKKYDEAYNELNLKVAINEDKKDFLPAFNETYYKDEVTNPVVLRAIKEYRKVLNALLKKYGKVHKINIELAREVGKNHSQRAKIEKEQNENYKAKKDAELECEKLGLKINSKNILKLRLFKEQKEFCAYSGEKIKISDLQDEKMLEIDHIYPYSRSFDDSYMNKVLVFTKQNQEKLNQTPFEAFGNDSAKWQKIEVLAKNLPTKKQKRILDKNYKDKEQKDFKDRNLNDTRYIARLVLNYTKDYLDFLPLSDDENTKLNDTQKGSKVHVEAKSGMLTSALRHTWGFSAKDRNNHLHHAIDAVIIAYANNSIVKAFSDFKKEQESNSAELYAKKISELDYKNKRKFFEPFSGFRQKVLDKIDEIFVSKPERKKPSGALHEETFRKEEEFYQSYGGKEGVLKALELGKIRKVNGKIVKNGDMFRVDIFKHKKTNKFYAVPIYTMDFALKVLPNKAVVQGKDKKSGLIKDWILMDENYEFCFSLYKDSLILIQTKDMQEPELVYFNAFTSSTVSLIVSKHDNKFETLSKNQKILFKNANEKEVIAKSIGIQNLKVFEKYIVSALGEVTKAEFRQREDFKK

SEQ ID NO: 349 - protein, 861 aa, Campylobacter jejuni
MARILAFDIGISSIGWAFSENDELKDCGVRIFTKAENPKTGESLALPRRLARSARKRLARRKARLNHLKHLIANEFKLNYEDYQSFDESLAKAYKGSLISPYELRFRALNELLSKQDFARVILHIAKRRGYDDIKNNGDEEKSEILKAIKQNEEKLVNYQSVGEYLYKEYFQKFKENSKEFINVRNKKESYERCITQSFLKDELKLIFQKQREFGFSFSKKFEEEVLSVAFYKRALKDFSHLVGNCSFFTDEKRAPKNSPLAFMFVALTRIINILNNLKNTEGILYTKDDLNALLNEVLKNGTLTYKQTKKLLGLSDDYEFKGEKGTYFIEFKKYKEFIKALGEHNLSQDDLNEIAKDITLIKDEIKLKKALAKYDLNQNQIDSLSKLEFKDHLNISFKALKLITPLMLEGKKYDEACNELNLKVAINEDKKDFLPAFNETYYKDEVTNPVVLRAIKEYRKILNALLKKYGKVHKINIELAREVGKNHSQRAKIEKEQNENYKAKKDAEIECEKLGLKINSKNILKLRLFKEQKEFCAYSGEKIKLSDLQDEKMLEIDHIYPYSRSFDDSYMNKVLVFTKQNQEKLNKTPFEAFGNDSTKWQKIEVLAKNLPEKKQKRILDKNYKDKEQKDFKDRNLNDTRYIARLVLNYTKDYLDFLPLSDDENTKLNDTQKGSKVHVEAKSGMLTSALRHTWGFSAKDRNNHLHHAIDAAIIAYANNSIVKAFSDFKKEQESNSVELYAKKISELDYKNKRKFFEPFSGFRQKVLDKIDEIFVSKPERKKPSGALHEETFRKEEEFYQSYGGKEGVLKALELGKIRKVNGKIVKNGDMFRVDIFKHKKTNKFLCCANLYYGFCFKSITK

SEQ ID NO: 350 - protein, 462 aa, Campylobacter jejuni
MARILAFDIGISSIGWAFSENDELKDCGVRIFTKAENPKTGESLALPRRLARSARKRLARRKARLNHLKHLIANEFKLNYEDYQSFDESLAKAYKGSLISPYELRFRALNELLSKQDFARVILHIAKRRGYDDIKNNGDEEKSEILKAIKQNEEKLVNYQSVGEYLYKEYFQKFKENSKEFINVRNKKESYERCITQSFLKDELKLIFQKQREFGFSFSKKFEEEVLSVAFYKRALKDFSHLVGNCSFFTDEKRAPKNSPLAFMFVALTRIINILNNLKNTEGILYTKDDLNALLNEVLKNGTLTYKQTKKLLGLSDDYEFKGEKGTYFIEFKKYKEFIKALGEHNLSQDDLNEIAKDITLIKDEIKLKKALAKYDLNQNQIDSLSKLEFKDHLNISFKALKLITPLMLEGKKYDEACNELNLKVAINEDKKDFLPAFNETYYKDEVTNPVVLRAIKEYRKS

SEQ ID NO: 351 - protein, 984 aa, Campylobacter jejuni
MARILAFDIGISSIGWAFSENDELKDCGVRIFTKAENPKTGESLALPRRLARSARKRLARRKARLNHLKHLIANEFKLNYEDYQSFDESLAKAYKGSLISPYELRFRALNELLSKQDFARVILHIAKRRGYDDIKNNGDEEKSEILKAIKQNEEKLVNYQSVGEYLYKEYFQKFKENSKEFINVRNKKESYERCITQSFLKDELKLIFQKQREFGFSFSKKFEEEVLSVAFYKRALKDFSHLVGNCSFFTDEKRAPKNSPLAFMFVALTRIINLLNNLKNTEGILYTKDDLNALLNEVLKNGTLTYKQTKKLLGLSDDYEFKGEKGTYFIEFKKYKEFIKALDEHSLSQDDLNEIAKDITLIKDEIKLKKALAKYDLNQNQIDSLSKLEFKDHLNISFKALKLITPLMLEGKKYDEACNELNLKVAINEDKKDFLPAFNETYYKDEVTNPVVLRAIKEYRKILNALLKKYGKVHKINIELAREVGKNHSQRAKIEKEQNENYKAKKDAEIECEKLGLKINSKNILKLRLFKEQKEFCAYSGEKIKISDLQDEKMLEIDHIYPYSRSFDDSYMNKVLVFTKQNQEKLNKTPFEAFGNDGVKWQKIEVLAKNLPEKKQKRILDKNYKDKEQKDFKDRNLNDTRYIARLVLNYTKDYLDFLPLSDDENTKLNDTQKGSKVHVEAKSGMLTSALRHTWGFSTKDRNNHLHHAIDAAIIAYANNSIVKAFSDFKKEQESNSAELYAKKISELDYKNKRKFFEPFSGFRQKVLDKIDEIFVSKPERKKPSGALHEETFRKEEEFYQSYGGKEGVLKALELGKIRKVNGKIVKNGDMFRVDIFKHKKTNKFYAVPIYTMDFALKVLPNKAVARSKKGEIKDWILMDENYEFCFSLYKDSLILIQTKDMQEPELVYFNAFTSSTVSLVVSKHDNKFETLSKNQKILFKNANEKEVIAKSIGIQNLKVFEKYIVSALGEVTKAEFRQREDFKK

SEQ ID NO: 352 - protein, 984 aa, Campylobacter jejuni
MARILAFDIGISSIGWAFSENDELKDCGVRIFTKAENPKTGESLALPRRLARSARKRLARRKARLNHLKHLIANEFKLNYEDYQSFDESLAKAYKGSLISPYELRFRALNELLSKQDFARVILHIAKRRGYDDIKNSDDKEKGAILKAIKQNEEKLANYQSVGEYLYKEYFQKFKENSKEFTNVRNKKESYERCIAQSFLKDELKLIFKKQREFGFSFSKKFEEEVLSVAFYKRALKDFSHLVGNCSFFTDEKRAPKNSPLAFMFVALTRIINLLNNLKNTEGILYTKDDLNALLNEVLKNGTLTYKQTKKLLGLSDDYEFKGEKGTYFIEFKKYKEFIKALGDHSLSQDDLNEIAKDITLIKDEIKLKKALAKYDLNQNQIDSLSKLEFKDHLNISFKALKLITPLMLEGKKYDEACNELNLKVAINEDKKDFLPAFNETYYKDEVTNPVVLRAIKEYRKVLNALLKKYGKVHKINIELAREVGKNYSQRAKIEKEQNENYKAKKDAELECEKLGLKINSKNILKLRLFKEQKEFCAYSGEKIKISDLQDEKMLEIDHIYPYSRSFDDSYMNKVLVFTKQNQEKLNQTPFEAFGNDSAKWQKIEVLAKNLPTKKQKRILDKNYKDKEQKDFKDRNLNDTRYIARLVLNYTKDYLDFLPLSDDENTKLNDTQKGSKVHVEAKSGMLTSALRHTWGFSAKDRNNHLHHAIDAVIIAYANNSIVKAFSDFKKEQESNSAELYAKKISELDYKNKRKFFEPFSGFRQKVLDKIDEIFVSKPERKKPSGALHEETFRKEEEFYQSYGGKEGVLKALELGKIRKVNGKIVKNGDMFRVDIFKHKKTNKFYAVPIYTMDFALKVLPNKAVARSKKGEIKDWILMDENYEFCFSLYKDSLILIQTKDMQEPEFVYYNAFTSSTVSLIVSKHDNKFETLSKNQKILFKNANEKEVIAKSIGIQNLKVFEKYIVSALGEVTKAEFRQREDFKK

SEQ ID NO: 353 - protein, 984 aa, Campylobacter jejuni
MARILAFDIGISSIGWAFSENDELKDCGVRIFTKAENPKTGESLALPRRLARSARKRLARRKARLNHLKHLIANEFKLNYEDYQSFDESLAKAYKGSLISPYELRFRALNELLSKQDFARVILHIAKRRGYDDIKNSDDKEKGAILKAIKQNEEKLANYQSVGEYLYKEYFQKFKENSKEFTNVRNKKESYERCIAQSFLKDELKLIFKKQREFGFSFSKKFEEEVLSVAFYKRALKDFSHLVGNCSFFTDEKRAPKNSPLAFMFVALTRIINLLNNLKNTEGILYTKDDLNTLLNEVLKNGTLTYKQTKKLLGLSDDYEFKGEKGTYFIEFKKYKEFIKALGEHNLSQDDLNEIAKDITLIKDEIKLKKALAKYDLNQNQIDSLSKLEFKDHLNISFKALKLITPLMLEGKKYDEACNELNLKVAINEDKKDFLPAFNETYYKDEVTNPVVLRAIKEYRKVLNALLKKYGKVHKINIELAREVGKNYSQRAKIEKEQNENYKAKKDAELECEKLGLKINSKNILKLRLFKEQKEFCAYSGEKIKISDLQDEKMLEIDHIYPYSRSFDDSYMNKVLVFTKQNQEKLNKTPFEAFGNDSTKWQKIEVLAKNLPEKKQKRILDKNYKDKEQKDFKDRNLNDTRYIARLVLNYTKDYLDFLPLSDDENTKLNDTQKGLKVHVEAKSGMLTSALRHTWGFSAKDRNNHLHHAIDAVIIAYANNSIVKAFSDFKKEQESNSAELYAKKISELDYKNKRKFFEPFSGFRQKVLDKIDEIFVSKPERKKPSGALHEETFRKEEEFYQSYGGKEGVLKALELGKIRKVNGKIVKNGDMFRVDIFKHKKTNKFYAVPIYTMDFALKVLPNKAVARSKKGEIKDWILMDENYEFCFSLYKDSLILIQTKDMQEPEFVYYNAFTSSTVSLIVSKHDNKFETLSKNQKILFKNANEKEVIAKSIGIQNLKVFEKYIVSALGEVTKAEFRQREDFKK

SEQ ID NO: 354 - protein, 984 aa, Campylobacter jejuni
MARILAFDIGISSIGWAFSENDELKDCGVRIFTKAENPKTGESLALPRRLARSARKRLARRKARLNHLKHLIANEFKLNYEDYQSFDESLAKAYKGSLISPYELRFRALNELLSKQDFARVILHIAKRRGYDDIKNSDDKEKGAILKAIKQNEEKLANYQSVGEYLYKEYFQKFKENSKEFTNVRNKKESYERCIAQSFLKDELKLIFKKQREFGFSFSKKFEEEVLSVAFYKRALKDFSHLVGNCSFFTDEKRAPKNSPLAFMFVALTRIINLLNNLKNTEGILYTKDDLNALLNEVLKNGTLTYKQTKKLLGLSDDYEFKGEKGTYFIEFKKYKEFIKALGDHSLSQDDLNEIAKDITLIKDEIKLKKALAKYDLNQNQIDSLSKLEFKDHLNISFKALKLITPLMLEGKKYDEACNELNLKVAINEDKKDFLPAFNETYYKDEVTNPVVLRAIKEYRKVLNALLKKYGKVHKINIELAREVGKNYSQRAKIEKEQNENYKAKKDAELECEKLGLKINSKNILKLRLFKEQKEFCAYSGEKIKISDLQDEKMLEIDHIYPYSRSFDDSYMNKVLVFTKQNQEKLNQTPFEAFGNDSAKWQKIEVLAKNLPTKKQKRILDKNYKDKEQKNFKDRNLNDTRYIARLVLNYTKDYLDFLPLSDDENTKLNDTQKGSKVHVEAKSGMLTSALRHTWGFSAKDRNNHLHHTIDAVIIAYANNSIVKAFSDFKKEQESNSAELYAKKISELDYKNKRKFFEPFSGFRQKVLDKIDEIFVSKPERKKPSGALHEETFRKEEEFYQSYGGKEGVLKALELGKIRKVNGKIVKNGDMFRVDIFKHKKTNKFYAVPIYTMDFALKVLPNKAVARSKKGEIKDWILMDENYEFCFSLYKDSLILIQTKDMQEPEFVYYNAFTSSTVSLIVSKHDNKFETLSKNQKILFKNANEKEVIAKSIGIQNLKVFEKYIVSALGEVTKAEFRQREDFKK

SEQ ID NO: 355 - protein, 984 aa, Campylobacter jejuni
MARILAFDIGISSIGWAFSENDELKDCGVRIFTKAENPKTGESLALPRRLARSARKRLARRKARLNHLKHLIANEFKLNYEDYQSFDESLAKAYKGSLISPYELRFRALNELLSKQDFARVILHIAKRRGYDDIKNSDDKEKGAILKAIKQNEEKLANYQSVGEYLYKEYFQKFKENSKEFTNVRNKKESYERCIAQSFLKDELKLIFKKQREFGFSFSKKFEEEVLSVAFYKRALKDFSHLVGNCSFFTDEKRAPKNSPLAFMFVALTRIINLLNNLKNTEGILYTKDDLNTFLNEVLKNGTLTYKQTKKLLGLSDDYEFKGEKGTYFIEFKKYKEFIKALGDHNLSQDDLNEIAKDITLIKDEIKLKKALAKYDLNQNQIDSLSKLEFKDHLNISFKALKLITPLMLEGKKYDEACNELNLKVAINEDKKDFLPAFNETYYKDEVTNPVVLRAIKEYRKVLNALLKKYGKVHKINIELAREVGKNHSQRAKIEKEQNENYKAKKDAELECEKLGLKINSKNILKLRLFKEQKEFCAYSGEKIKISDLQDEKMLEIDHIYPYSRSFDDSYMNKVLVFTKQNQEKLNKTPFEAFGNDSAKWQKIEVLAKNLPTKKQKRILDKNYKDKEQKDFKDRNLNDTRYIARLVLNYTKDYLDFLPLSDDENTKLNDTQKGSKVHVEAKSGMLTSALRHTWGFSTKDRNNHLHHAIDAVIIAYANNSIVKAFSDFKKEQESNSAELYAKKISELDYKNKRKFFEPFSGFRQKVLDKIDEIFVSKPERKKPSGALHEETFRKEEEFYQSYGGKEGVLKALELGKIRKVNGKIVKNGDMFRVDIFKHKKTNKFYAVPIYTMDFALKVLPNKAVARSKKGEIKDWILMDENYEFCFSLYKDSLILIQTKDMQEPEFVYYNAFTSSTVSLIVSKHDNKFETLSKNQKILFKNANEKEVIAKSIGIQNLKVFEKYIVSALGEVTKAEFRQREDFKK

SEQ ID NO: 356 - protein, 987 aa, Campylobacter jejuni
MARILAFDIGISSIGWAFSENDELKDCGVRIFTKAENPKTGESLALPRRLARSARKRLARRKARLNHLKHLIANEFKLNYEDYQSFDESLAKAYKGSLISPYELRFRALNELLSKQDFARVILHIAKRRGYDDIKNSDDKEKGAILKAIKQNEEKLANYQSVGEYLYKEYFQKFKENSKEFTNVRNKKESYERCIAQSFLKDELKLIFKKQREFGFSFSKKFEEEVLSVAFYKRALKDFSHLVGNCSFFTDEKRAPKNSPLAFMFVALTRIINLLNNLKNTEGILYTKDDLNTLLNEVLKNGTLTYKQTKKLLGLSDDYEFKGEKGTYFIEFKKYKEFIKSLGDHSLSQDDLNEIAKDITLIKDEIKLKKALAKYDLNQNQIDSLSKLEFKDHLNISFKALKLITPLMLEGKKYDEACNELNLKVAINEDKKDFLPAFNETYYKDEVTNPVVLRAIKEYRKVLNALLKKYGKVHKINIELAREVGKNHSQRAKIEKEQNENYKAKKDAELECEKLGLKINSKNILKLRLFKEQKEFCAYSGEKIKISDLQDEKMLEIDHIYPYSRSFDDSYMNKVLVFTKQNQEKLNQTPFEAFGNDSAKWQKIEVLAKNLPTKKQKRILDKNYKDKEQKNFKDRNLNDTRYIARLVLNYTKDYLDFLPLSDDENTKLNDTQKGSKVHVEAKSGMLTSALRHTWGFSAKDRNNHLHHAIDAVIIAYANNSIVKAFSDFKKEQESNSAELYAKKISELDYKNKRKFFEPFSGFRQKVLDKIDEIFVSKPERKKPSGALHEETFRKEEEFYQSYGGKEGVLKALELGKIRKVNGKIVKNGDMFRVDIFKHKKTNKFYAVPIYTMDFALKVLPNKAVARSKKGEIKDWILMDENYEFCFSLYKDSLILIQTKDMQEPEFVYYNAFTSSTVSLIVSKHDNKFETLSKNQKILFKNANEKEVIAKSIGIQNLKVFEKYIVSALGEVTKAEFRQREDFKNELR

SEQ ID NO: 357 - protein, 987 aa, Campylobacter jejuni
MARILAFDIGISSIGWAFSENDELKDCGVRIFTKAENPKTGESLALPRRLARSARKRLARRKARLNHLKHLIANEFKLNYEDYQSFDESLAKAYKGSLISPYELRFRALNELLSKQDFARVILHIAKRRGYDDIKNSDDKEKGAILKAIKQNEEKLANYQSVGEYLYKEYFQKFKENSKEFTNVRNKKESYERCIAQSFLKDELKLIFKKQREFGFSFSKKFEEEVLSVAFYKRALKDFSHLVGNCSFFTDEKRAPKNSPLAFMFVALTRIINLLNNLKNTEGILYTKDDLNALLNEVLKNGTLTYKQTKKLLGLSDDYEFKGEKGTYFIEFKKYKEFIKALGDHSLSQDDLNEIAKDITLIKDEIKLKKALVKYDLNQNQIDSLSKLEFKDHLNISFKALKLITPLMLEGKKYDEACNELNLKVAINEDKKDFLPAFNETYYKDEVTNPVVLRAIKEYRKVLNALLKKYGKVHKINIELAREVGKNYSQRAKIEKEQNENYKAKKDAELECEKLGLKINSKNILKLRLFKEQKEFCAYSGEKIKISDLQDEKMLEIDHIYPYSRSFDDSYMNKVLVFTKQNQEKLNQTPFEAFGNDSAKWQKIEVLAKNLPTKKQKRILDKNYKDKEQKDFKDRNLNDTRYIARLVLNYTKDYLDFLPLSDDENTKLNDTQKGSKVHVEAKSGMLTSALRHTWGFSAKDRNNHLHHAIDAVIIAYANNSIVKAFSDFKKEQESNSAELYAKKISELDYKNKRKFFEPFSGFRQKVLDKIDEIFVSKPERKKPSGALHEETFRKEEEFYQSYGGKEGVLKALELGKIRKVNGKIVKNGDMFRVDIFKHKKTNKFYAVPIYTMDFALKVLPNKAVARSKKGEIKDWILMDENYEFCFSLYKDSLILIQTKDMQEPELVYFNAFTSSTVSLIVSKHDNKFETLSKNQKILFKNANEKEVIAKSIGIQNLKVFEKYIVSALGEVTKAEFRQREDFKNELR

SEQ ID NO: 358 - protein, 983 aa, Campylobacter jejuni; identical to SEQ ID NO: 236

SEQ ID NO: 359 - protein, 987 aa, Campylobacter jejuni
MARILAFDIGISSIGWAFSENDELKDCGVRIFTKAENPKTGESLALPRRLARSARKRLARRKARLNHLKHLIANEFKLNYEDYQSFDESLAKAYKGSLISPYELRFRALNELLSKQDFARVILHIAKRRGYDDIKNSDDKEKGAILKAIKQNEEKLVNYQSVGEYLYKEYFQKFKENSKEFTNVRNKKESYERCIAQSFLKDELKLIFKKQREFGFSFSKKFEEEVLSVAFYKRALKDFSHLVGNCSFFTDEKRAPKNSPLAFMFVALTRIINLLNNLKNTEGILYTKDDLNALLNEVLKNGTLTYKQTKKLLGLSDDYEFKGEKGTYFIEFKKYKEFIKALGDHSLSQDDLNEIAKDITLIKDEIKLKKALAKYDLNQNQIDSLSKLEFKDHLNISFKALKLITPLMLEGKKYDEACNELNLKVAINEDKKDFLPAFNETYYKDEVTNPVVLRAIKEYRKVLNALLKKYGKVHKINIELAREVGKNYSQRAKIEKEQNENYKAKKDAELECEKLGLKINSKNILKLRLFKEQKEFCAYSGEKIKISDLQDEKMLEIDHIYPYSRSFDDSYMNKVLVFTKQNQEKLNQTPFEAFGNDSAKWQKIEVLAKNLPTKKQKRILDKNYKDKEQKDFKDRNLNDTRYIARLVLNYTKDYLDFLPLSDDENTKLNDTQKGSKVHVEAKSGMLTSALRHTWGFSAKDRNNHLHHAIDAVIIAYANNSIVKAFSDFKKEQESNSAELYAKKISELDYKNKRKFFEPFSGFRQKVLDKIDEIFVSKPERKKPSGALHEETFRKEEEFYQSYGGKEGVLKALELGKIRKVNGKIVKNGDMFRVDIFKHKKTNKFYAVPIYTMDFALKVLPNKAVARSEKGEIKDWILMDENYEFCFSLYKDSLILIQTKDMQEPELVYFNAFTSSTVSLIVSKHDNKFETLSKNQKILFKNANEKEVIAKSIGIQNLKVFEKYIVSALGEVTKAEFRQREDFKNELR

SEQ ID NO: 360 - protein, 987 aa, Campylobacter jejuni
MARILAFDIGISSIGWAFSENDELKDCGVRIFTKAENPKTGESLALPRRLARSARKRLARRKARLNHLKHLIANEFKLNYEDYQSFDESLAKAYKGSLISPYELRFRALNELLSKQDFARVILHIAKRRGYDNIKNSDNEEKSEILKAIKQNEEKLVNYQSVGEYLYKEYFQKFKENSKEFINVRNKKESYERCIAQSFLKDELKLIFQKQREFGLSFSKKFEEEVLSVAFYKRALKDFSHLVGNCSFFTDEKRAPKNSPLAFMFVALTRIINLLNNLKNTEGILYTKDDLNTLLNEVLKNGTLTYKQTKKLLGLSDDYEFKGEKGTYFIEFKKYKEFIKALGDHSLSQDDLNEIAKDITLIKDEIKLKKALAKYDLNQNQIDSLSKLEFKDHLNISFKALKLITPLMLEGKKYDEACNELNLKVVINEDKKDFLPAFNETYYKDEVTNPVVLRAIKEYRKVLNALLKKYGKVHKINIELAREVGKNHSQRAKIEKEQNENYKAKKDAELECEKLGLKINNKNILKLRLFKEQKEFCAYSGEKIKLSDLQDEKMLEIDHIYPYSRSFDDSYMNKVLVFTKQNQEKLNKTPFEAFGNDSTKWQKIEVLAKNLPTKKQKRILDKNYKDKEQKDFKDRNLNDTRYIARLVLNYTKDYLDFLPLSDDENTKLNDIQKGSKVHVEAKSGMLTSALRHTWGFSTKDRNNHLHHAIDAVIIAYANNSIVKAFSDFKKEQESNSAELYAKKISELDYKNKRKFFEPFSGFRQKVLDKIDEIFVSKPERKKPSGALHEETFRKEEEFYQSYGGKEGVLKALELGKIRKVNGKIVKNGDMFRVDIFKHKKTNKFYAVPIYTMDFALKVLPNKAVVQGKDKKSGLIKDWILMDENYEFCFSLYKDSLILIQTKDMQEPEFVYYNAFTSSTVSLIVSKHDNKFETLSKNQKILFKNANEKEVIAKSIGIQNLKVFEKYIVSALGEVTKAEFRQREDFKK

SEQ ID NO: 361 - protein, 984 aa, Campylobacter jejuni
MARILAFDIGISSIGWAFSENDELKDCGVRIFTKAENPKTGESLALPRRLARSARKRLARRKARLNHLKHLIANEFKLNYEDYQSFDESLAKAYKGSLISPYELRFRALNELLSKQDFARVILHIVKRRGYDDIKNSDDKEKGAILKAIKQNEEKLANYQSVGEYLYKEYFQKFKENSKEFTNVRNKKESYERCIAQSFLKDELKLIFKKQREFGFSFSKKFEEEVLSVAFYKRALKDFSHLVGNCSFFTDEKRAPKNSPLAFMFVALTRIINLLNNLKNTEGILYTKDDLNTLLNEVLKNGTLTYKQTKKLLGLSDDYEFKGEKGTYFIEFKKYKEFIKALGDHSLSQDDLNEIAKDITLIKDEIKLKKALAKYDLNQNQIDSLSKLEFKDHLNISFKALKLITPLMLEGKKYDEACNELNLKVAINEDKKDFLPAFNETYYKDEVTNPVVLRAIKEYRKVLNALLKKYGKVHKINIELAREVGKNHSQRAKIEKEQNENYKAKKDAEFECEKLGLKINSKNILKLRLFKEQKEFCAYSGEKIKISDLQDEKMLEIDHIYPYSRSFDDSYMNKVLVFTKQNQEKLNKTPFEAFGNDSAKWQKIEVLAKNLPTKKQKRILDKNYKDKEQKDFKDRNLNDTRYIARLVLNYTKDYLDFLPLSDDENTKLNDTQKGSKVHVEAKSGMLTSALRHTWGFSTKDRNNHLHHAIDAVIIAYANNSIVKAFSDFKKEQESNSAELYAKKISELDYKNKRKFFEPFSGFRQKVLDKIDEIFVSKPERKKPSGALHEETFRKEEEFYQSYGGKEGVLKALELGKIRKVNGKIVKNGDMFRVDIFKHKKTNKFYAVPIYTMDFALKVLPNKAVARSKKGEIKDWILMDENYEFCFSLYKDSLILIQTKDMQEPEFVYYNAFTSSTVSLIVSKHDNKFETLSKNQKILFKNANEKEVIAKSIGIQNLKVFEKYIVSALGEVTKAEFRQREDFKK

SEQ ID NO: 362 - protein, 984 aa, Campylobacter jejuni
MARILAFDIGISSIGWAFSENDELKDCGVRIFTKAENPKTGESLALPRRLARSARKRLARRKARLNHLKHLIANEFKLNYEDYQSFDESLAKAYKGSLISPYELRFRALNELLSKQDFARVILHIVKRRGYDDIKNSDDKEKGTILKAIKQNEEKLANYQSVGEYLYKEYFQKFKENSKEFTNVRNKKESYERCIAQSFLKDELKLIFKKQREFGFSFSKKFEEEVLSVAFYKRALKDFSHLVGNCSFFTDEKRAPKNSPLAFMFVALTRIINLLNNLKNTEGILYTKDDLNTLLNEVLKNGTLTYKQTKKLLGLSDDYEFKGEKGTYFIEFKKYKEFIKALGEHNLSQDDLNEIAKDITLIKDEIKLKKALAKYDLNQNQIDSLSKLEFKDHLNISFKALKLITPLMLEGKKYDEACNELNLKVAINEDKKDFLPAFNETYYKDEVTNPVVLRAIKEYRKVLNALLKKYGKVHKINIELAREVGKNYSQRAKIEKEQNENYKAKKDAELECEKLGLKINSKNILKLRLFKEQKEFCAYSGEKIKISDLQDEKMLEIDHIYPYSRSFDDSYMNKVLVFTKQNQEKLNQTPFEAFGNDSAKWQKIEVLAKNLPTKKQKRILDKNYKDKEQKDFKDRNLNDTRYIARLVLNYTKDYLDFLPLSDDENTKLNDTQKGSKVHVEAKSGMLTSALRHTWGFSAKDRNNHLHHAIDAVIIAYANNSIVKAFSDFKKEQESNSAELYAKKISELDYKNKRKFFEPFSGFRQKVLDKIDEIFVSKPERKKPSGALHEETFRKEEEFYQSYGGKEGVLKALELGKIRKVNGKIVKNGDMFRVDIFKHKKTNKFYAVPIYTMDFALKVLPNKAVARSKKGEIKDWILMDENYEFCFSLYKDSLILIQTKDMQEPEFVYYNAFTSSTVSLIVSKHDNKFETLSKNQKILFKNANEKEVIAKSIGIQNLKVFEKYIVSALGEVTKAEFRQREDFKK

SEQ ID NO: 363 - protein, 987 aa, Campylobacter jejuni
MARILAFDIGISSIGWAFSENDELKDCGVRIFTKAENPKTGESLALPRRLARSARKRLARRKARLNHLKHLIANEFKLNYEDYQSFNESLAKAYKGSLISPYELRFRALNELLSKQDFARVILHIAKRRGYDDIKNSDDKEKGAILKVIKQNEEKLANYQSVGEYLYKEYFQKFKENSKEFTNVRNKKESYERCIAQSFLKDELKLIFQKQREFGFSFSKKFEEEVLSVAFYKRALKDFSHLVGNCSFFTDEKRAPKNSPLAFMFVALTRIINLLNNLKNTEGILYTKDDLNALLNEVLKNGTLTYKQTKKLLGLSDDYEFKGEKGTYFIEFKKYKEFIKALGDHSLSQDDLNEIAKDITLIKDEIKLKKALAKYDLNQNQIDSLSKLEFKDHLNISFKALKLITPLMLEGKKYDEACNELNLKVAINEDKKDFLPAFNETYYKDEVTNPVVLRAIKEYRKVLNALLKKYGKVHKINIELAREVGKNYSQRAKIEKEQNENYKAKKDAELECEKLGLKINSKNILKLRLFKEQKEFCAYSGEKIKISDLQDEKMLEIDHIYPYSRSFDDSYMNKVLVFTKQNQEKLNQTPFEAFGNDSAKWQKIEVLAKNLPTKKQKRILDKNYKDKEQKDFKDRNLNDTRYIARLVLNYTKDYLDFLPLSDDENTKLNDTQKGSKVHVEAKSGMLTSALRHTWGFSAKDRNNHLHHAIDAVIIAYANNSIVKAFSDFKKEQESNSAELYAKKISELDYKNKRKFFEPFSGFRQKVLDKIDEIFVSKPERKKPSGALHEETFRKEEEFYQSYGGKEGVLKALELGKIRKVNGKIVKNGDMFRVDIFKHKKTNKFYAVPIYTMDFALKVLPNKAVARSKKGEIKDWILMDENYEFCFSLYKDSLILIQTKDMQEPELVYFNAFTSSTVSLIVSKHDNKFETLSKNQKILFKNANEKEVIAKSIGIQNLKVFEKYIVSALGEVTKAEFRQREDFKNELR

SEQ ID NO: 364 - protein, 984 aa, Campylobacter jejuni
MARILAFDIGISSIGWAFSENDELKDCGVRIFTKAENPKTGESLALPRRLARSARKRLARRKARLNRLKHLIANEFKLNYEDYQSFDESLAKAYKGSLISPYELRFRALNELLSKQDFARVILHIAKRRGYDDIKNSDDKEKGAILKAIKQNEEKLANYQSVGEYLYKEYFQKFKENSKEFTNVRNKKESYERCIAQSFLKDELKLIFKKQREFGFSFSKKFEEEVLSVAFYKRALKDFSHLVGNCSFFTDEKRAPKNSPLAFMFVALTRIINLLNNLKNTEGILYTKDDLNALLNEVLKNGTLTYKQTKKLLGLSDDYEFKGEKGTYFIEFKKYKEFIKALGDHSLNQDDLNEIAKDITLIKDEIKLKKALAKYDLNQNQIDSLSKLEFKDHLNISFKALKLITPLMLEGKKYDEACNELNLKVAINEDKKDFLPAFNETYYKDEVTNPVVLRAIKEYRKVLNALLKKYGKVHKINIELAREVGKNYSQRAKIEKEQNENYKAKKDAELECEKLGLKINSKNILKLRLFKEQKEFCVYSGEKIKISDLQDEKMLEIDHIYPYSRSFDDSYMNKVLVFTKQNQEKLNQTPFEAFGNDSAKWQKIEVLAKNLPTKKQKRILDKNYKDKEQKDFKDRNLNDTRYIARLVLNYTKDYLDFLPLSDDENTKLNDTQKGSKVYVEAKSGMLTSALRHTWGFSTKDRNNHLHHAIDAVIIAYANNSIVKAFSDFKKEQESNSAELYAKKISELDYKNKRKFFEPFSGFRQKVLDKIDEIFVSKPERKKPSGALHEETFRKEEEFYQSYGGKEGVLKALELGKIRKVNGKIVKNGDMFRVDIFKHKKTNKFYAVPIYTMDFALKVLPNKAVARSKKGEIKDWILMDENYEFCFSLYKDSLILIQTKDMQEPEFVYYNAFTSSTVSLIVSKHDNKFETLSKNQKILFKNANEKEVIAKSIGIQNLKVFEKYIVSALGEVTKAEFRQREDFKK

SEQ ID NO: 365 - protein, 984 aa, Campylobacter jejuni
MARILAFDIGISSIGWAFSENDELKDCGVRIFTKVENPKTGESLALPRRLARSARKRLARRKARLNHLKHLIANEFKLNYEDYQSFDESLAKAYKGSLISPYELRFRALNELLSKQDFARVILHIAKRRGYDDIKNSDDKEKGAILKAIKQNEEKLANYQSVGEYLYKEYFQKFKENSKEFTNVRNKKESYERCIAQSFLKDELKLIFKKQREFGFSFLKKFEEEVLSVAFYKRALKDFSHLVGNCSFFTDEKRAPKNSPLAFMFVALTRIINLLNNLKNTEGILYTKDDLNALLNEVLKNGTLTYKQTKKLLGLSDDYEFKGEKGTYFIEFKKYKEFIKALGEHNLSQDDLNEIAKDITLIKDEIKLKKALAKYDLNQNQIDSLSKLEFKDHLNISFKALKLITPLMLEGKKYDEAYNELNLKVAINEDKKDFLPAFNETYYKDEVTNPVVLRAIKEYRKVLNALLKKYGKVHKINIELAREVGKNHSQRAKIEKEQNENYKAKKDAELECEKLGLKINSKNILKLRLFKEQKEFCAYSGEKIKISDLQDEKMLEIDHIYPYSRSFDDSYMNKVLVFTKQNQEKLNQTPFEAFGNDSAKWQKIEVLAKNLPTKKQKRILDKNYKDKEQKDFKDRNLNDTRYIARLVLNYTKDYLDFLPLSDDENTKLNDTQKGSKVHVEAKSGMLTSALRHTWGFSAKDRNNHLHHAIDAVIIAYANNSIVKAFSDFKKEQESNSAELYAKKISELDYKNKRKFFEPFSGFRQKVLDKIDEIFVSKPERKKPSGALHEETFRKEEEFYQSYGGKEGVLKALELGKIRKVNGKIVKNGDMFRVDIFKHKKTNKFYAVPIYTMDFALKVLPNKAVARSKKGEIKDWILMDENYEFCFSLYKDSLILIQTKDMQEPELVYFNAFTSSTVSLIVSKHDNKFETLSKNQKILFKNANEKEVIAKSIGIQNLKVFEKYIVSALGEVTKAEFRQREDFKK

SEQ ID NO: 366 - protein, 984 aa, Campylobacter jejuni
MARILAFDIGISSIGWAFSENDELKDCGVRIFTKVENPKTGESLALPRRLARSARKRLARRKARLNHLKHLIANEFKLNYEDYQSFDESLAKAYKGSLISPYELRFRALNELLSKQDFARVILHIAKRRGYDDIKNSDDKEKGAILKAIKQNEEKLANYQSVGEYLYKEYFQKFKENSKEFTNVRNKKESYERCIAQSFLKDELKLIFKKQREFGFSFSKKFEEEVLSVAFYKRALKDFSHLVGNCSFFTDEKRAPKNSPLAFMFVALTRIINLLNNLKNTEGILYTKDDLNALLNEVLKNGTLTYKQTKKLLGLSDDYEFKGEKGTYFIEFKKYKEFIKALGEHNLSQDDLNEIAKDITLIKDEIKLKKALAKYDLNQNQIDSLSKLEFKDHLNISFKALKLITPLMLEGKKYDEACNELNLKVAINEDKKDFLPAFNETYYKDEVTNPVVLRAIKEYRKVLNALLKKYGKVHKINIELAREVGKNHSQRAKIEKEQNENYKAKKDAELECEKLGLKINSKNILKLRLFKEQKEFCAYSGEKIKISDLQDEKMLEIDHIYPYSRSFDDSYMNKVLVFTKQNQEKLNKTPFEAFGNDSAKWQKIEVLAKNLPTKKQKRILDKNYKDKEQKDFKDRNLNDTRYIARLVLNYTKDYLDFLPLSNDENTKLNDTQKGSKVHVEAKSGMLTSALRHTWGFSTKDRNNHLHHAIDAVIIAYANNSIVKAFSDFKKEQESNSAELYAKKISELDYKNKRKFFEPFSGFRQKVLDKIDEIFVSKPERKKPSGALHEETFRKEEEFYQSYGGKEGVLKALELGKIRKVNGKIVKNGDMFRVDIFKHKKTNKFYAVPIYTMDFALKVLPNKAVARSKKGEIKDWILMDENYEFCFSLYKDSLILIQTKDMQEPEFVYYNAFTSSTVSLIVSKHDNKFETLSKNQKILFKNANEKEVIAKSIGIQNLKVFEKYIVSALGEVTKAEFRQREDFKK

SEQ ID NO: 367 - protein, 984 aa, Campylobacter jejuni
MARILAFDIGISSIGWAFSENDELKDCGVRIFTKVENPKTGESLALPRRLARSARKRLARRKARLNHLKHLIANEFKLNYEDYQSFDESLAKAYKGSLISPYELRFRALNELLSKQDFARVILHIAKRRGYDDIKNSDDKEKGAILKAIKQNEEKLANYQSVGEYLYKEYFQKFKENSKEFTNVRNKKESYERCIAQSFLKDELKLIFKKQREFGFSFSKKFEEEVLSVAFYKRALKDFSHLVGNCSFFTDEKRAPKNSPLAFMFVALTRIINLLNNLKNTEGILYTKDDLNALLNEVLKNGTLTYKQTKKLLGLSDDYEFKGEKGTYFIEFKKYKEFIKALGEHNLSQDDLNEIAKDITLIKDEIKLKKALAKYDLNQNQIDSLSKLEFKDHLNISFKALKLITPLMLEGKKYDEACNELNLKVAINEDKKDFLPAFNETYYKDEVTNPVVLRAIKEYRKVLNALLKKYGKVHKINIELAREVGKNHSQRAKIEKEQNENYKAKKDAELECEKLGLKINSKNILKLRLFKEQKEFCAYSGEKIKISDLQDEKMLEIDHIYPYSRSFDDSYMNKVLVFTKQNQEKLNKTPFEAFGNDSAKWQKIEVLAKNLPTKKQKRILDKNYKDKEQKDFKDRNLNDTRYIARLVLNYTKDYLDFLPLSDDENTKLNDTQKGSKVHVEAKSGMLTSALRHTWGFSTKDRNNHLHHAIDAVIIAYANNSIVKAFSDFKKEQESNSAELYAKKISELDYKNKRKFFEPFSGFRQKVLDKIDEIFVSKPERKKPSGALHEETFRKEEEFYQSYGGKEGVLKALELGKIRKVNGKIVKNGDMFRVDIFKHKKTNKFYAVPIYTMDFALKVLPNKAVARSKKGEIKDWILMDENYEFCFSLYKDSLILIQTKDMQEPEFVYYNAFTSSTVSLIVSKHDNKFETLSKNQKILFKNANEKEVIAKSIGIQNLKVFEKYIVSALGEVTKAEFRQREDFKK

SEQ ID NO: 368 - protein, 984 aa, Campylobacter jejuni
MARILAFDIGISSIGWAFSENDELKDCGVRIFTKVENPKTGESLALPRRLARSARKRLARRKARLNHLKHLIANEFKLNYEDYQSFDESLAKAYKGSLISPYELRFRALNELLSKQDFARVILHIAKRRGYDDIKNSDDKEKGAILKAIKQNEEKLANYQSVGEYLYKEYFQKFKENSKEFTNVRNKKESYERCIAQSFLKDELKLIFKKQREFGFSFSKKFEEEVLSVAFYKRALKDFSHLVGNCSFFTDEKRAPKNSPLAFMFVTLTRIINLLNNLKNTEGILYTKDDLNALLNEVLKNGTLTYKQTKKLLGLSDDYEFKGEKGTYFIEFKKYKEFIKALGEHNLSQDDLNEIAKDITLIKDEIKLKKALAKYDLNQNQIDSLSKLEFKDHLNISFKALKLITPLMLEGKKYDEACNELNLKVAINEDKKDFLPAFNETYYKDEVTNPVVLRAIKEYRKVLNALLKKYGKVHKINIELAREVGKNHSQRAKIEKEQNENYKAKKDAELECEKLGLKINSKNILKLRLFKEQKEFCAYSGEKIKISDLQDEKMLEIDHIYPYSRSFDDSYMNKVLVFTKQNQEKLNKTPFEAFGNDSAKWQKIEVLAKNLPTKKQKRILDKNYKDKEQKDFKDRNLNDTRYIARLVLNYTKDYLDFLPLSDDENTKLNDTQKGSKVHVEAKSGMLTSALRHTWGFSTKDRNNHLHHAIDAVIIAYANNSIVKAFSDFKKEQESNSAELYAKKISELDYKNKRKFFEPFSGFRQKVLDKIDEIFVSKPERKKPSGALHEETFRKEEEFYQSYGGKEGVLKALELGKIRKVNGKIVKNGDMFRVDIFKHKKTNKFYAVPIYTMDFALKVLPNKAVARSKKGEIKDWILMDENYEFCFSLYKDSLILIQTKDMQEPEFVYYNAFTSSTVSLIVSKHDNKFETLSKNQKILFKNANEKEVIAKSIGIQNLKVFEKYIVSALGEVTKAEFRQREDFKK

SEQ ID NO: 369 - protein, 984 aa, Campylobacter jejuni
MARILAFDIGISSIGWAFSENDELKDCGVRIFTKVENPKTGESLALPRRLARSARKRLARRKARLNHLKHLIANEFKLNYEDYQSFDESLAKAYKGSLISPYELRFRALNELLSKQDFARVILHIAKRRGYDDIKNSDDKEKGAILKAIKQNEEKLANYQSVGEYLYKEYFQKFKENSKEFTNVRNKKESYERCIAQSFLKDELKLIFKKQREFGFSFSKKFEEEVLSVAFYKRALKDFSHLVGNCSFFTDEKRAPKNSPLAFMFVALTRIINLLNNLKNTEGILYTKDDLNALLNEVLKNGTLTYKQTKKLLGLSDDYEFKGEKGTYFIEFKKYKEFIKALGEHNLSQDDLNEIAKDITLIKDEIKLKKALAKYDLNQNQIDSLSKLEFKDHLNISFKALKLITPLMLEGKKYDEACNELNLKVAINEDKKDFLPAFNETYYKDEVTNPVVLRAIKEYRKVLNALLKKYGKVHKINIELAREVGKNHSQRAKIEKEQNENYKAKKDAELECEKLGLKINSKNILKLRLFKEQKEFCAYSGEKIKISDLQDEKMLEIDHIYPYSRSFDDSYMNKVLVFTKQNQEKLNKTPFEAFGNDSAKWQKIEVLAKNLPTKKQKRILDKNYKDKEQKDFKDRNLNDTRYIARLVLNYTKDYLDFLPLSDDENTKLNDTQKGSKVHVEAKSGMLTSALRHTWGFSTKDRNNHLHHAIDAVIIAYANNSIVKAFSDFKKEQESNSAELYAKKISELDYKNKRKFFEPFSGFRQKVLDKIDEIFVSKPERKKPSGALHEETFRKEEEFYQSYGGKEGVLKALELGKIRKVNGKIVKNGDMFRVDIFKHKKTNKFYAVPIYTMDFALKVLPNKAVARSKKGEIKDWILMDENYEFCFSLYKDSLILIQTKDMQEPEFVYYNAFTSSTVSLIVSKHDNKFETLSKNQKILFKNANEKEVIAKSIGIQNLKVFEKYIVSALGEVTKAEFIQREDFKK

SEQ ID NO: 370 - protein, 987 aa, Campylobacter jejuni
MARILAFDIGISSIGWAFSENDELKDCGVRIFTKVENPKTGESLALPRRLARSARKRLARRKARLNHLKHLIANEFKLNYEDYQSFDESLAKAYKGSLISPYELRFRALNELLSKQDFARVILHIAKRRGYDDIKNSDDKEKGAILKAIKQNEEKLANYQSVGEYLYKEYFQKFKENSKEFTNVRNKKESYERCIAQSFLKDELKLIFKKQREFGFSFSKKFEEEVLSVAFYKRALKDFSHLVGNCSFFTDEKRVPKNSPLAFMFVALTRIINLLNNLKNTEGILYTKDDLNALLNEVLKNGTLTYKQTKKLLGLSDDYEFKGEKGTYFIEFKKYKEFIKALGEHNLSQDDLNEIAKDITLIKDEIKLKKALAKYDLNQNQIDSLSKLEFKDHLNISFKALKLITPLMLEGKKYDEACNELNLKVAINEDKKDFLPAFNETYYKDEVTNPVVLRAIKEYRKVLNALLKKYGKVHKINIELAREVGKNHSQRAKIEKEQNENYKAKKDAELECEKLGLKINSKNILKLRLFKEQKEFCAYSGEKIKISDLQDEKMLEIDHIYPYSRSFDDSYMNKVLVFTKQNQEKLNQTPFEAFGNDSAKWQKIEVLAKNLPTKKQKRILDKNYKDKEQKNFKDRNLNDTRYIARLVLNYTKDYLDFLPLSDDENTKLNDTQKGSKVHVEAKSGMLTSALRHTWGFSAKDRNNHLHHAIDAVIIAYANNSIVKAFSDFKKEQESNSAELYAKKISELDYKNKRKFFEPFSGFRQKVLDKIDEIFVSKPERKKPSGALHEETFRKEEEFYQSYGGKEGVLKALELGKIRKVNGKIVKNGDMFRVDIFKHKKTNKFYGVPIYTMDFALKVLPNKAVARSKKGEIKDWILMDENYEFCFSLYKDSLILIQTKDMQEPEFVYYNAFTSSTVSLIVSKHDNKFETLSKNQKILFKNANEKEVIAKSIGIQNLKVFEKYIVSALGEVTKAEFRQREDFKNELR

SEQ ID NO: 371 - protein, 984 aa, Campylobacter jejuni
MARILAFDIGISSIGWAFSENDELKDCGVRIFTKVENPKTGESLALPRRLARSARKRLARRKVRLNHLKHLIANEFKLNYEDYQSFDESLAKAYKGSLISPYELRFRALNELLSKQDFARVILHIAKRRGYDDIKNSDDKEKGAILKAIKQNEEKLANYQSVGEYLYKEYFQKFKENSKEFTNVRNKKESYERCIAQSFLKDELKLIFKKQREFGFSFSKKFEEEVLSVAFYKRALKDFSHLVGNCSFFTDEKRAPKNSPLAFMFVALTRIINLLNNLKNTEGILYTKDDLNALLNEVLKNGTLTYKQTKKLLGLSDDYEFKGEKGTYFIEFKKYKEFIKALGEHNLSQDDLNEIAKDITLIKDEIKLKKALAKYDLNQNQIDSLSKLEFKDHLNISFKALKLITPLMLEGKKYDEACNELNLKVAINEDKKDFLPAFNETYYKDEVTNPVVLRAIKEYRKVLNALLKKYGKVHKINIELAREVGKNHSQRAKIEKEQNENYKAKKDAELECEKLGLKINSKNILKLRLFKEQKEFCAYSGEKIKISDLQDEKMLEIDHIYPYSRSFDDSYMNKVLVFTKQNQEKLNKTPFEAFGNDSAKWQKIEVLAKNLPTKKQKRILDKNYKDKEQKDFKDRNLNDTRYIARLVLNYTKDYLDFLPLSDDENTKLNDTQKGSKVHVEAKSGMLTSALRHTWGFSTKDRNNHLHHAIDAVIIAYANNSIVKAFSDFKKEQESNSAELYAKKISELDYKNKRKFFEPFSGFRQKVLDKIDEIFVSKPERKKPSGALHEETFRKEEEFYQSYGGKEGVLKALELGKIRKVNGKIVKNGDMFRVDIFKHKKTNKFYAVPIYTMDFALKVLPNKAVARSKKGEIKDWILMDENYEFCFSLYKDSLILIQTKDMQEPEFVYYNAFTSSTVSLIVSKHDNKFETLSKNQKILFKNANEKEVIAKSIGIQNLKVFEKYIVSALGEVTKAEFRQREDFKK

SEQ ID NO: 372 - protein, 721 aa, Campylobacter jejuni
MFVALTRIINLLNNLKNTEGILYTKDDLNTLLNEVLKNGTLTYKQTKKLLGLSDDYEFKGEKGTYFIEFKKYKEFIKALGDHSLSQDDLNEIAKDITLIKDEIKLKKALAKYDLNQNQIDSLSKLEFKDHLNISFKALKLITPLMLEGKKYDEACNELNLKVAINEDKKDFLPAFNETYYKDEVTNPVVLRAIKEYRKVLNALLKKYGKVHKINIELAREVGKNYSQRAKIEKEQNENYKAKKDAELECEKLGLKINSKNILKLRLFKEQKEFCAYSGEKIKISDLQDEKMLEIDHIYPYSRSFDDSYMNKVLVFTKQNQEKLNQTPFEAFGNDSAKWQKIEVLAKNLPTKKQKRILDKNYKDKEQKDFKDRNLNDTRYIARLVLNYTKDYLDFLPLSDDENTKLNNTQKGSKVYVEAKSGMLTSALRHTWGFSTKDRNNHLHHAIDAVIIAYANNSIVKAFSDFKKEQESNSAELYAKKISELDYKNKRKFFEPFSGFRQKVLDKIDEIFVSKPERKKPSGALHEETFRKEEEFYQSYGGKEGVLKALELGKIRKVNGKIVKNGDMFRVDIFKHKKTNKFYAVPIYTMDFALKVLPNKAVARSKKGEIKDWILMDENYEFCFSLYKDSLILIQTKDMQEPEFVYYNAFTSSTVSLIVSKHDNKFETLSKNQKILFKNANEKEVIAKSIGIQNLKVFEKYIVSALGEVTKAEFRQREDFKK

SEQ ID NO: 373 - protein, 512 aa, Campylobacter jejuni
MHKINIELAREVGKNHSQRAKIEKEQNENYKAKKDAEIECEKLGLKINSKNILKLRLFKEQKEFCAYSGEKIKLSDLQDEKMLEIDHIYPYSRSFDDSYMNKVLVFTKQNQEKLNKTPFEAFGNDSTKWQKIEVLAKNLPEKKQKRILDKNYKDKEQKDFKDRNLNDTRYIARLVLNYTKDYLDFLPLSDDENTKLNDTQKGSKVHVEAKSGMLTSALRHTWGFSAKDRNNHLHHAIDAAIIAYANNSIVKAFSDFKKEQESNSVELYAKKISELDYKNKRKFFEPFSGFRQKVLDKIDEIFVSKPERKKPSGALHEETFRKEEEFYQSYGGKEGVLKALELGKIRKVNGKIVKNGDMFRVDIFKHKKTNKFYAVPIYTMDFALKVLPNKAVARSKKGEIKDWILMDENYEFCFSLYKDSLILIQTKDMQEPELVYFNAFTSSTVSLIVSKHDNKFETLSKNQKILFKNANEKEVIAKSIGIQNLKVFEKYIVSALGEVTKAEFRQREDFKK

SEQ ID NO: 374 - protein, 965 aa, Campylobacter jejuni
MKIIGFNLGIANIGWALRENDEIIDCGVRVFDIPENPKNGNSLALERRENKARMKIVKRKKARMLATKTFLKKELNVDLSKLFLIGSTQSIYELRAKALSSLISKEELSAIILHIAKHRGYDDSALKNENGTIIEALNKNKETMLKFKSVGEYFYKNFVQNKEVKKIRNTTEDYSNSVPRSLLKQELDLILDKQKELGLIKNADFKEKLFEIIFFKRPLKDFSNKIGNCIFFENEKRAAKNTISACEFVALGKVVNLLKSIEKDIGIVYEKDSINEIMSIILDKTSISYKKIRDILNLPQEINFKGLDYSKNNVENSKLVDLKKLNEFKKALGDGFANLDKDILDSIATDITLTKDTATLKEKLKNYNVLNAEQIEKLSELVFNDHINLSLKALKQIIPLMYEGKRYDEACELCNFTIAKNQEKSEYLPLFEKTRFAKDISSPVVIRAICEFRKLLNDIIRRYGSVHKIHLELTRDFGISFSDRKKIIKEIEQNEQSRIKALETIKELKLEETSKNIQIVRLFEDQKGICPYSGLKMDLNRLDELVIDYIRPYNRSLDDSYSNKVLTFKKLSDLKQGKTPFEAFGEDEKLWAEINERIKEYNGKKRFKIFDKFFKDKKPFDFTEQTLQDTRWLTKLVASYLNEYLSFLPISEDENTALGYGEKGSKQHVILSSGMITQMLRNFWYLGFKNHKDYKNNAMDAIIVAFTTNSIIFAFNNFKKELDLAKAEFYANKISESDYLLKRKFLPPFSGFKEQALEKVKNIFVSHSLKIKNKGTLHDLTPLKIKELKNTYGDLDLAVKLGKIRKYNDKYYANANGSLVRADLFVDKKNKFHAVSIYKADFSTKKLPNKTPATTSNGETKEGIEMNENYNFCMSLYKNTPISVKIKGMKEPIICYYHGFNTSGSKITYKKHDNNYHNLSEDEMVVFRKNDKESIAVGKILEIKKYSISPSGELSLIENEERKWF

SEQ ID NO: 375 - protein, 759 aa, Campylobacter jejuni
MLSVAFYKRALKDFSHLVGNCSFFTDEKRAPKNSPLAFMFVALTRIINLLNNLKNTEGILYTKDDLNALLNEVLKNGTLTYKQTKKLLGLSDDYEFKGEKGTYFIEFKKYKEFIKALGEHNLSQDDLNEIAKDITLIKDEIKLKKALAKYDLNQNQIDSLSKLEFKDHLNISFKALKLITPLMLEGKKYDEACNELNLKVAINEDKKDFLPAFNETYYKDEVTNPVVLRAIKEYRKVLNALLKKYGKVHKINIELAREVGKNHSQRAKIEKEQNENYKAKKDAELECEKLGLKINSKNILKLRLFKEQKEFCAYSGEKIKISDLQDEKMLEIDHIYPYSRSFDDSYMNKVLVFTKQNQEKLNKTPFEAFGNDSAKWQKIEVLAKNLPTKKQKRILDKNYKDKEQKDFKDRNLNDTRYIARLVLNYTKDYLDFLPLSDDENTKLNDTQKGSKVHVEAKSGMLTSALRHTWGFSTKDRNNHLHHAIDAVIIAYANNSIVKAFSDFKKEQESNSAELYAKKISELDYKNKRKFFESFSGFRQKVLDKIDEIFVSKPERKKPSGALHEETFRKEEEFYQSYGGKEGVLKALELGKIRKVNGKIVKNGDMFRVDIFKHKKTNKFYAVPIYTMDFALKVLPNKAVARSKKGEIKDWILMDENYEFCFSLYKDSLILIQTKDMQEPEFVYYNAFTSSTVSLIVSKHDNKFETLSKNQKILFKNANEKEVIAKSIGIQNLKVFEKYIVSALGEVTKAEFRQREDFKK

SEQ ID NO: 376 - protein, 984 aa, Campylobacter jejuni
MVRILAFDIGISSIGWAFSENDELKDCGVRIFTKVENPKTGESLALPRRLARSARKRLARRKARLNHLKHLIANEFKLNYEDYQSFDESLAKAYKGSLISPYELRFRALNELLSKQDFARVILHIAKRRGYDDIKNSDDKEKGAILKAIKQNEEKLANYQSVGEYLYKEYFQKFKENSKEFTNVRNKKESYERCIAQSFLKDELKLIFKKQREFGFSFSKKFEEEVLSVAFYKRALKDFSHLVGNCSFFTDEKRAPKNSPLAFMFVALTRIINLLNNLKNTEGILYTKDDLNALLNEVLKNGTLTYKQTKKLLGLSDDYEFKGEKGTYFIEFKKYKEFIKALGEHNLSQDDLNEIAKDITLIKDEIKLKKALAKYDLNQNQIDSLSKLEFKDHLNISFKALKLITPLMLEGKKYDEACNELNLKVAINEDKKDFLPAFNETYYKDEVTNPVVLRAIKEYRKVLNALLKKYGKVHKINIELAREVGKNHSQRAKIEKEQNENYKAKKDAELECEKLGLKINSKNILKLRLFKEQKEFCAYSGEKIKISDLQDEKMLEIDHIYPYSRSFDDSYMNKVLVFTKQNQEKLNKTPFEAFGNDSAKWQKIEVLAKNLPTKKQKRILDKNYKDKEQKDFKDRNLNDTRYIARLVLNYTKDYLDFLPLSDDENTKLNDTQKGSKVHVEAKSGMLTSALRHTWGFSTKDRNNHLHHAIDAVIIAYANNSIVKAFSDFKKEQESNSAELYAKKISELDYKNKRKFFEPFSGFRQKVLDKIDEIFVSKPERKKPSGALHEETFRKEEEFYQSYGGKEGVLKALELGKIRKVNGKIVKNGDMFRVDIFKHKKTNKFYAVPIYTMDFALKVLPNKAVARSKKGEIKDWILMDENYEFCFSLYKDSLILIQTKDMQEPEFVYYNAFTSSTVSLIVSKHDNKFETLSKNQKILFKNANEKEVIAKSIGIQNLKVFEKYIVSALGEVTKAEFRQREDFKK

SEQ ID NO: 377 - protein, 1003 aa, Campylobacter lari]
MRILGFDIGINSIGWAFVENDELKDCGVRIFTKAENPKNKESLALPRRNARSSRRRLKRRKARLIAIKRILAKELKLNYKDYVAADGELPKAYEGSLASVYELRYKALTQNLETKDLARVILHIAKHRGYMNKNEKKSNDAKKGKILSALKNNALKLENYQSVGEYFYKEFFQKYKKNTKNFIKIRNTKDNYNNCVLSSDLEKELKLILEKQKEFGYNYSEDFINEILKVAFFQRPLKDFSHLVGACTFFEEEKRACKNSYSAWEFVALTKIINEIKSLEKISGEIVPTQTINEVLNLILDKGSITYKKFRSCINLHESISFKSLKYDKENAENAKLIDFRKLVEFKKALGVHSLSRQELDQISTHITLIKDNVKLKTVLEKYNLSNEQINNLLEIEFNDYINLSFKALGMILPLMREGKRYDEACEIANLKPKTVDEKKDFLPAFCDSIFAHELSNPVVNRAISEYRKVLNALLKKYGKVHKIHLELARDVGLSKKAREKIEKEQKENQAVNAWALKECENIGLKASAKNILKLKLWKEQKEICIYSGNKISIEHLKDEKALEVDHIYPYSRSFDDSFINKVLVFTKENQEKLNKTPFEAFGKNIEKWSKIQTLAQNLPYKKKNKILDENFKDKQQEDFISRNLNDTRYIATLIAKYTKEYLNFLLLSENENANLKSGEKGSKIHVQTISGMLTSVLRHTWGFDKKDRNNHLHHALDAIIVAYSTNSIIKAFSDFRKNQELLKARFYAKELTSDNYKHQVKFFEPFKSFREKILSKIDEIFVSKPPRKRARRALHKDTFHSENKIIDKCSYNSKEGLQIALSCGRVRKIGTKYVENDTIVRVDIFKKQNKFYAIPIYAMDFALGILPNKIVITGKDKNNNPKQWQTIDESYEFCFSLYKNDLILLQKKNMQEPEFAYYNDFSISTSSICVEKHDNKFENLTSNQKLLFSNAKEGSVKVESLGIQNLKVFEKYIITPLGDKIKADFQPRENISLKTSKKYGLR

SEQ ID NO: 378 - protein, 372 aa, candidate division
DNESAINQIAYILTTQKADEGIRAELDSLPLSDKAKKAIVKIKPTNFKAFGHLSIKALQKITPHILEGMTYDKACEAAGYDFKKQSASLEQITNPVVKRAITQTLKVVRAIERKYGKPYFIKVETARDLAKNFKDRNAIKKENEENQGYNEDIKSIITNGYEASPKTKGGKQLLNHLKEFNVRLNKNADFNGQQIIKVKLYREQQGKCLYSGNPIDFETMLRDDNAYQVDHIVPFSRSNNDGITNKVLVFTEENQKKADRTPFEYFGTDERRWEKFVALVETTYKTRDVKTSDKATNAINYEYNGYAMKKKQNLLLQDYKNDSWNVRALNDTRYITRFIQNYLRQNVDFAEGEEKQRIIAPNGTTTAYLRKR

SEQ ID NO: 379 - protein, 1117 aa, Capnocytophaga ochracea
MKHILGLDLGSNSIGWAFVQQDFENKQGKIIATGSRIIPMDQGILGDFERGNTVSQTAERTTYRSMRRLRERHLLRRERLHRVLHLLGFLPPHYDAQIDFTKRYGKFIDNAEPKIAYNNGNFIFMNSFNEMVEDFKKHQPQLFYKKSNGEESRIPYDWTIYYLRKKALSQKITQQELAWLILHFNQKRGYYQLRGEEETENPNKEVAFHSLKVVDVEAEAPNKKGEIWYTIRLENGWIYRRTSKNPLDDWKGKTRDFIVTTDLNDDGTIKLDKEGKEKRSFRAPDENDWNLLKKKTEHDIDFSGKPVGTYIYDHLLQNPNQKIKGKLVRTIERKYYKDELKAILAKQIALQPELFTETLLADCIRELYRKNETQQQNLLSKDFLHLFVEDIIFYQRPLCSKKSTIANCTLEKRSYIDKETNERKDAPIKVCAKSNPYYQEFRVLQWLQNLRIYEIETDREVTAEFIETPQDYEALFNFLMSQKEIDNEGLLKYFLFAKNPQIKDKAAKSELKKWLTTYRWNYVYDAADNSSKKYPMNETGYELQRYLQKVEGLPANFLTFDITYQLWHLLYSVKDKVEFEKALKKFAKKKQLDKTSFVDSFKNFKPYPNEYGSFSEKAIKKLLPLMRFGNHWDFNRIDVSTQKRIDDLINGVANEDIRTIIREKAEKYQLNSETCFQDLPLWLAQYVVYNRHAEATDIEKWTSVSDLEAYLEDFKQHSLRNPIVEQVVTETLRVVRDIWQQYSGGQANFFDEIHIELGRELKKTAEERKQLSDKNQENENTNLRIKKLLAELKEDASIQNVRPYSLVQQELLKIYEEGVFSSTDEIEEDIQKIRKKVEPTPPEIQRYKLWLEQKYKSPYTGEVISLTKLFTEEYEIEHIIPQSRYYDDSLSNKVICESAVNKLKTNQLGLEFIQNHHGEKVRITANKEVTIFTEEQYKEFVKKHYANNSAKQQKLLLNEIPEKMVARQLNDTRYISKCISEILSKIVRSDEKDEGVNSKNIIPCTGKITTALKQDWGLNDVWNELILPRFERMNQLTQTQLFTSYNDRLQKNLPTVPIEYSQGFQKKRIDHRHHAMDALVIACATREHINYMNNQHALDKSKDKKEKQQSRIDLHPL

SEQ ID NO: 380 - protein, 303 aa, Capnocytophaga ochracea
MSFKQNLRVINKATNYYEKWEEKNGVLVKKKVKQEGTNWAIRKPLHKETVSGKIVLDRKIGKDKILTATRKAVDITFTEKIISSITDTGIQKILLNYLKYKGSPEVAFSAEGLEELNKNIAQYNDGKKHQPIYKVRIFEEGSKFPLGETGAKATKYVEAAKGTNLFFGVYQGKEKRTYATIPLNEVIERQKQGLPSVPERNEKGEPLLFSLSPNDLVYVPMEGEIAETIDFNNLSKEQKERIYKTVSFTGNQCFFVQEAVASPIVNKMEYSPLNKMERDILGIMIKEVCVKLKVDRLGNIIKA

SEQ ID NO: 381 - protein, 1471 aa, Unknown
  Capnocytophaga sp.
MCKYFYIKNFITFVLSKSIIPMKHILGLDLGSNSIGWAFVQQDFENKQGKIIATGSRIIPMDQGILGDFERGNTVSQTAERTTYRSTRRLRERHLLRRERLHRVLHILGFLPPHYDAQIDFTKRYGKFIDNAEPKIAYNNGNFIFMNSFNEMIEDFKKHQPQLFYKKSNGEESKIPYDWTIYYLRKKALSQKITQQELAWLILHFNQKRGYYQLRGEEETENPNKEVAFHSLKVVDVEAEAPNKKGEIWYTIRLENGWIYRRTSKIPLDDWKGKTRDFIVTTDLNDDGTIKVDKEGKEKRSFRAPDENDWNLLKKKTEHDIDFSGKTVGAYIYDHLLQNPNQKIKGKLVRTIERKYYKDELKAILAKQIALQPELFTETLLADCIRELYRKNETQQQNLLSKDFLHLFVEDIIFYQRPLRSKKSTIANCTLEKRSYIDKETNERKDAPIKVCAKSNPYYQEFRVLQWLQNLRIYEIETDREVTAEFIETPQDCEALFNFLMSQKEIDNKGLLKYFLFAKNPQIKDKAAKSELKKWLTTYRWNYVYDAADNSSKKYPMNETGYELQRYLQKVEGLPANFLTFDITYQLWHLLYSVKDKVEFEKALKKFAKKKQLDKTSFVDSFKNFKPYPNEYGSFSEKAIKKLLPLMRFGNHWDFNRIDVSTQKRIDDLINGVANEDIRTIIREKAEKYQLNSETCFQDLPLWLAQYVVYNRHAEATDIEKWTSVSDLEAYLEDFKQHSLRNPIVEQVVTETLRVVRDIWQQYGGGQANFFDEIHIELGRELKKTAEERKQLSDKNQENESTNLRIKKLLAELKEDASIQNVRPYSLVQQELLKIYEEGVFSATDEVEEDIQKIRKKAEPSKADLQRYKLWLEQKYKSPYTGEVISLTKLFTEEYEIEHIIPQSRYYDDSLSNKVICESAVNKLKTNQLGLEFIQNHHGEKVRITANKEVTIFTEEQYKEFVKKHYANNSAKQQKLLLNEIPEKMVARQLNDTRYISKYISEILSKIVRSDEKDEGVNSKNIIPCTGKITTALKQDWGLNDVWNKLILPRFERMNQLTQTQLFTSYNDRLQKNLPTVPIEYSQGFQKKRIDHRHHAMDALVIACATREHINYMNNQHALDKSKDKKEKQQSRIDLRTILCEKKNNNWQFKKPWSTFTQEAKEALEHIVVSFKQNLRVINKATNYYEKWEEKNGVLVKKKVKQEGTNWAIRKPLHKETVSGKIVLDRKIGKDKILTATRKAVDITFTEKIISSITDTGIQKILLNYLKYKGSPEVAFSTEGLEELNKNIAQYNNGKKHQPIYKVRIFEEGSKFPLGETGAKATKYVEAAKGTNLFFGVYQGKGKRTYATIPLNEVIERQKQGLPSVPERNEKGEPLLFSLSPNDLVYVPMEGEIAETIDFNNLSKEQKERIYKTVSFTGNQCFFVQEAVATPIVNKMEYSPLNKMERDILGTMIKEVCIKLKVDRLGNITKA

SEQ ID NO: 382 - protein, 1450 aa, Unknown
  Capnocytophaga sp.
MKHILGLDLGSNSIGWAFVQQDFENKQGKIIATGSRIIPMDQGILGDFERGNTVSQTAERTTYRNTRRLRERHLLRRERLHRVLHILGFLPPHYDSQIDFTKRYGKFIDNAEPKIAYNNGNFIFMNSFNEMIEDFKKYQPQLFYKKSNGEESKIPYDWTIYYLRKKALSQKITQQELAWLILHFNQKRGYYQLRGEEETENPNKEVAFHSLEVVDVEAEAPNKKGEIWYTIRLENGWIYRRTSKIPLDDWKGKTRDFIVTTDLNDDGTIKLDKEGKEKRSFRAPDENDWNLLKKKTEHDIDFSGKTVGAYIYDHLLQNPNQKIKGKLVRTIERKYYKDELKAILAKQIALQPELFTETLLADCIRELYRKNETQQQNLLSKDFLHLFVEDIIFYQRPLRSKKSTIANCTLEKRSYIDKETNERKDTPIKVCAKSNPYYQEFRVLQWLQNLRIYEIETDREVTAEFIETAQDNEALFNFLMSQKEIDNESLLKYFLFAKNPQIKDKVAKSELKKWLTTYRWNYVYDAADNSSKKYPMNETGYELQQYLQKVEGLPANFLTFDITYRLWHLLYSVKDKVEFEKALKKFAQEYQLDEASFVDSFKNFKPYPNEYGSFSEKAIKKLLPLMRFGNHWDFNRIDVSTQKRIDDLINGVANDEIRTIIREKAEKYQLNSETCFQGLPLWLAQYVVYNRHAEAADIEKWTSVNDLEAYLEDFKQHSLRNPIVEQVITETLRVVRDIWQRYGGGQANFFDEIHIELGRELKKTAEERKQLSNRNQENENTNLRIKKLLAELKEDASIQNVRPYSPVQQELLKIYEEGVFSATDEVEEDIQKIRKKAEPTTPEIQRYKLWLEQKYKSPYTGEVISLTKLFTEEYEIEHIIPQSRYYDDSLSNKVICESAVNKLKTNQLGLEFIQNHHGEKVRITANKEVTIFTEEQYKEFVKKHYANNSAKQQKLLLNEIPEKMVARQLNDTRYISKYISEILSKIVRSDEKDEGVNSKNIIPCTGKITTALKQDWGLNDVWNELILPRFERMNQLTQTQLFTSYNDRFQKNLPTVPIEYSQGFQKKRIDHRHHAMDALVIACATREHINYMNNQHALDKSKDKKEKQQSRIDLRTILCEKKNNNWQFKKPWSTFTQEAQEALEHIVVSFKQNLRVINKATNYYEKWEEKNGVLVKKKVKQEGTNWAIRKPLHKETVSGKIVLDRKIGKDKILTATRKSVDITFTEKIISSITDTGIQKILLNYLKYKGSPEVAFSAEGLEELNKNIAQYNDGKKHQPIYKVRIFEEGSKFPLGETGAKATKYVEAAKGTNLFFGVYQGKGKRTYATIPLNEVIERQKQGLPSVPERNEKGEPLLFSLSPNDLVYVPMEGEIAETIDFNNLSKEQKERIYKTVSFTGNQCFFVQEAVATPIVNKIEYSPLNKMERDILGTMIKEVCIKLKVDRLGNITKA

SEQ ID NO: 383 - protein, 1435 aa, Unknown
  Capnocytophaga sp.
MKNILGLDLGTTSIGFAHIVEDENKEKSEIKELGVRIVSLATDEQSDFEKGKSISTNANRTLKHGARLNLDRYQQRRKFLIDLLQKANLITSASILAENGKNTTHSTWQLRAKAVTERIEKEEFARVLLAINKKRGYKNSRKTKTEDEGQAIDGMAIAKCLYDENLTPGQLSLQLLQQNKKLLPDFYRSDLQKEFDLVWNLQKQFYPDILTDSFYKELQGKGKDATSKAFSKRYHFDTAENKGSKESVRLQAYQWRAEAISKQLSKEEVAYVLTEINNNLNNSSGYLGAISDRSKELYFNRQTVGQYLYAQLQENRHNSLKNKVFYRQDYLDEFERIWETQASFHKELTDELKKQIRDVVIFYQRKLKSQKGLVSFCEFESKEIEIEKDGKAITKSIGARVVPKSSPLFQEFKIWQILNNVTCKRKGIRKKKSSAKSTELDLFNEPSQSIFSLDMECKQLLFDELNLKGDLKSDKVLKLLGYSPQEWEINYNQLEGNRTQKSLYEAYLKIIEIEGYEVKDILQIKSTKDDWSLDESPLSASEIRERVKVIFQTLGICTKILYFDPLLPVKEFEQQYSYQLWHLLYSYESDDSTSGNETLYRILEKKYAFKREHATILANVALQDDYGSLSTKAIRKIYPYIKENQYSTACELAGYKHSKLSLTTEELEARELKNIIPLLKKNALRNPVVEKILNQMINVVNALIEKNSERDAEGKITKYFHFDEIRIELARELKKNAQERYEMTQNINKAKLEHQKISEKLQKQFGIKNPTKSDIIRYRLYQELEHNGYKELYTNTYIAPDVLFSKNIDIEHIVPKARVFDDSFSNKTLAFKEFNIKKGESTAFDYITSLNCEGELNQYLTRVENAYKTKSISLTKYKNLLKKASEIGDGFINRDLRDTQYIAKKAKEILFQVTKNVLSTSGSITDRLREDWGLVDVMKELNMPKYQSLGLTEVEERKDGNKVTVIKDWTKRNDHRHHAMDALTVAFTKPSYIQYLNHLNARKDENNKNYSVILAIEKKETIKVPINNGKNKRVFIEPILNFRQVAKKHLEEIFISHKAKNKVVTKNINKPAGTDKQQITLTPRGQLHKETIYGKYQYYVNKEEKVGVKFDERTITKVSNPLYREALLKRLQANDNDPKKAFAGKNALSKNPIYLDEAKTKTLPEKVNLTYLEEDFSIRKDISPDNFKDLKSIEKVIDQGVKRILIKRLQAYDNDPKKAFVDLEKNPIWLNKEKGIAIKRVTISGVSNAQPLHIGKDHLGKTTLNKEGKEVPVDYVSTGNNHHVAIYRDKEGNLQEQIVSFFEAVVRAQQGLPIIDKNYKQAEGWQFMFTMKQNEMFVFPNEATGFNPAEIDLLDPKNKKLISPNLFRVQTISIVKYGNSVVRDFKFRHHLETTLQDDKILQGITFQQIKSLEPLRNIVKVRINHLGDIVNIGEY

SEQ ID NO: 384 - protein, 1432 aa, Unknown
  Capnocytophaga sp.
MKNILGLDLGTTSIGFAHIVEDENKEKSEIKELGVRIVSLTTDEQSDFEKGKSITTNANRTLKHGARLNLDRYQQRRKYLIDLLHKANLITPSSILAENGKNTTHSTWQLRAKAVTERIEKEEFARILLAINKKRGYKSSRKAKTEDEGQAIDGMAIAKRLYDENLTPGQLSLQLLQQNKKLLPDFYRSDLQKEFDLVWNFQKQFYPDILTDIFYKELQGKGKDATSKAFSKRYHFDTAENKGSKESVRLQAYQWRAEAVSKQLSKEEVAYVLTEINNNLNNASGYLGAISDRSKELYFNRQTVGQYLYAQLQENRHNSLKNKVFYRQDYLDEFERIWETQALFHKELTDELKKQIRDVVIFYQRKPKSQKGLISFCEFESKEIEIEKDGKTITKNIGARVVPKSSPLFQEFKIWQILNNVICKRKGIRKKKISAKTTQLDLLNESSQTIFSLDMECKQLLFDELNLKGDLKSDKVLKLLGYSPQEWEINYNQLEGNRTQKALYEAYLKIVEMEAHDVKDILQIKSTKDDWSLDESPLSASEIRESVKAIFQALGICTKILYFDPLLPVKDFEEQDSYQLWHLLYSYESDDSTSGNETLYRILEKKYAFKREHARILANVALQDDYGSLSTKAIRKIYPNIKENQYSTACEMAGYKHSKLSLTTEELEARELKNIIPLLKKNALRNPVVEKILNQMINVVNALIEKNSERDAEGKITKYFHFDEIRIELARELKKNAQKRYEMTQNINKAKSEHQKISEILQKEFGIKNPTKSDIIRYRLYKELEHNGYKELYTNTYIAPDVLFSKNIDIEHIVPKARVFDDSFSNKTLAFKDFNIKKGESTAFDYITSLKNEEKLNQYLARVENAYKTKNISPAKYKNLLKKASEIGDGFINRDLRDTQYIAKKAKEILFQVTKNVLSTSGSITDRLREDWSLVDVMKELNMPKYQSLGLTEVEERKDGNKVTVIKDWTKRNDHRHHAMDALTVAFTKPSYIQYLNHLNARKDENNKNYSVILAIEKKETIKVPTNNGKNKRVFIEPIPNFRQVAKKHLEEIFISHKAKNKVVTKNTNKPAGTNKQQITLTPRGQLHKETIYGKYQYYVNKEEKVGVKFDKETIAKVSNPLYREALLKRLQANDNDPKKAFTGKNALSKNPIYLDEAKTKTLPEKVNLTYLEEDFSVRKKIVPKNPTSKEFVPNLKSIEKVVDEGVRNILIERLRVYNNDPEKAFVDLEKNPIWLNKEKGIAIKRVTISGVNNAQPLHIGKDHLGKTTLNKEGKEIPVDYVSTGNNHHVAIYRDKEGNLQEQIVSFFEAVVRTQQGLPIIDKTYKQEEGWQFLFTMKQNEMFVFPNEATGFNPAEIDLLDPKNKKQISPNLFRVQKIATKDYFFRHHLETNVETDNVLKNTTWKREGLSGLKDIVKVRINHLGDIVSIGEY

SEQ ID NO: 385 - protein, 1426 aa, Unknown
  Capnocytophaga sp.
MKNILGLDLGTTSIGFTHIVEDENKEKSEIKELGVRIVSLTTDEQSDFEKGKSISTNANRTLKHGARLNLDRYQQRRKFLIDLLQKANLITSSSILAENGKNTTHSTWQLRAKAVTERIEKEEFARVLLAINKKRGYKSSRKAKTEDEGQAIDGMAIAKRLYDENLTPGQLSLQLLQQNKKLLPDFYRSDLQKEFDLVWNFQKQFYPDILTDSFYKELQGKGKDATSKAFSKRYHFDTAENKGSRESVRLQAYQWRAEAISKQLSKEEVAYVLTEINNNLNNASGYLGAISDRSKELYFNRQTVGQYLYAQLQENKHNSLKNKVFYRQDYLDEFERIWETQASFHKELTEELKKQIRDVVIFYQRKLKSQKGLISFCEFESKEIEIEKDGKTITKSIGARVVPKSSPLFQEFKIWQILNNVTCKRKGIRKKKSSAKSTELDLFNEPSQTIFSLDMECKQLLFEELNLKGDLKSDKVLKLLGYSPQEWEINYNQLEGNRTQKALYEAYLKIVEMEAHDVKDILQIKSTKDDWALEESPLSASEIRERVKAIFQTLGICTKILYFDPLLPVKEFEEQDSYQLWHLLYSYESDDSTSGNETLYRILEKKYAFKREHATILANVTLQDDYGSLSTKAIRKIYPYIKENQYSTACEKAGYKHSKLSLTTEELEARELKNIIPLLKKNALRNPVVEKILNQMINVVNALIEKNSERDAEGKITKYFHFDEIRIELARELKKNAQERYEMTQNINKAKLEHQKISGILQKEFGIKNPTKSDITRYRLYQELAHNGYNDLYTNTYIPKELLFSKNIDIEHIVSKARVFDDSFSNKTLAFREFNIKKGESTAFDYITSLNNEEELNQYLNRVENAYKTKNISPAKYKNLLKKASEIGDGFINRDLRDTQYIAKKAKEILFQVTKNVLSTSGSITDRLREDWGLVDVMKELNMPKYQSLGLTEVEERKEGNKVTVIKNWTKRNDHRHHAMDALTVAFTKPSYIQYLNHLNARKDKNNKNYSVILAIEEKETIKVPTNNGKNKRVFIEPIPNFRQVAKKHLEEIFISHKAKNKVVTKNTNKPAGTDKQQITLTPRGQLHKETVYGKYQYYVNKEEKIGVKFDKETIAKVSNPVYREALLKRLQANDNDPKKAFAGKNALSKNPIYLDEAKTKTLTEKVNLTYLEEDFSIRKDISPDNFKDLKSIEKVIDQGVKRILIKRLQDYDNDPKKAFVDLEKNPIWLNKEKGIAIKRVTISGVNNAQPLHIGKDHLGKTTLNKEGKEIPVDYVSTGNNHHVAIYRDKEGNLQEQIVSFFEAVVGAQQGLPIVDKTYKQAEGWQFLFTMKQNEMFVFPNEATGFNPAEIDLLDPKNKKQISPNLFRVQKIATKDYFFRHHLETNVDTDNVLKNTTWKREGLSGLKDIVKVRINHLGDIVSIGEY

SEQ ID NO: 386 - protein, 1450 aa, Unknown
  Capnocytophaga sp.
MKRILGLDLGSNSIGWAFVEQDFENKQGKIIATGSRIIPMDQGILGDFEKGNTVSQTAERTTYRSMRRLRERHLLRRERLHRVLHILGFLPPHYDAQIDFTKRYGKFIDNAEPKIAYNNGNFIFMNSFNEMIEDFKKYQPQLFYKKSNGEESKIPYDWTIYYLRKKVLSQKITQQELAWLILHFNQKRGYYQLRGEEETENPNKEVAFHSLKVVDVEAEAPNKKGEIWYTIRLENGWIYRRTSKIPLDDWKGKTRDFIVTTDLNDDGTIKVDKEGKEKRSFRAPDENDWNLLKKKTEHDIDFSGKTVGAYIYDHLLQNPNQKIKGKLVRTIERKYYKDELKAILAKQIALQPELFTETLLADCIRELYRKNETQQQNLLSKDFLHLFVEDIIFYQRPLRSKKSTIANCTLEKRSYIDKETNERKDTFIKVCAKSNPYYQEFRVLQWLQNLRIYEIETDREVTAEFIETAEDYEALFNFLMSQKEIDNEGLLKYFLFAKNPQIKDKVAKSELKKWLTTYRWNYVYDAADNSSKKYPMNETGYDLQRYLQKVEGLPANFLTFDITYRLWHLLYSVKDKVEFEKALKKFAQEYQLDEASFVDSFKNFKPYPNEYGSFSEKAIKKLLPLMRFGNHWDFNRIDVSTQKRIDDLINGVANDEIRTIIREKAEKYQLNSESCFQGLPLWLAQYVVYNRHAEATDIEKWTSVSDLETYLEDFKQHSLRNPIVEQVVTETLRVVRDIWQQYGGGQANFFDEIHIELGRELKKTAEERKQLSNRNQENENTNLRIKKLLAELKEDASIQNVRPYSPVQQELLKIYEEGVFSSTDQVEEDIQKIRKKAEPTTPEIQRYKLWLEQKYKSPYTGEVISLTKLFTEEYEIEHIIPQSRYYDDSLSNKVICESAVNKLKTNQLGLEFIQNHHGEKVRITGNKEVTIFTEEQYKEFVKKHYANNSAKQQKLLLNEIPEKMVARQLNDTRYISKYISEILSKIVRSDEKDEGVNSKNVIPCTGKITTALKQDWGLNDVWNELILPRFERMNQLTQTQLFTSYNDRFQKNLPTVPIEYSQGFQKKRIDHRHHAMDALVIACATREHINYMNNQHALDKNKDKKEKQQSRIDLRTILCEKKNNNWQFKKPWSTFTQETKEALEHIVVSFKQNLRVINKATNYYEKWEEKNGVLVKKKVKQEGTNWAIRKPLHKETVSGKIVLDRKIGKDKILTATRKEVDITFTEKIISSITDTGIQKILLNYLNYKGSPEVAFSAEGLEELNKNIAQYNDGKKHQPIYKVRIFEEGSKFPLGETGAKATKFVEAAKGTNLFFGVYQGKEKRSYATIPLNEVIERQKQGLPSVPERNEKGEPLLFSLSPNDLVYVPMEGEIAETIDFNNLSKEQKERIYKTVSFTGNQCFFVQEAVATPIVNKMEYSPLNKMERDILGTMIKEVCIKLKVDRLGNITKA

SEQ ID NO: 387 - protein, 1437 aa, Unknown
  Capnocytophaga sp.
MKYIKYILGLDIGSNSIGWALIQLDLLQKTKRIIATGSRIIPMDQKVLSDFGKGITISPTAQRTSYRNARHCRERHLLRRERLHRVLHILGFLPTHYDKQIDFSKRYGKFVDNTEPKIAYNERKFLFMDSFQEMLADFKIHQPDLFYTKKNGEESKIPYDWTIYYLRKKALSRKISKEELAWIILNFNQKRGYYQLREEEEENKENDFEIISSKIISVIKKDKDKKYNKYWYDIILENGLVYQAAFYNDFVYNWINQDREFIIERISLKNGTEKVKLSYLPTFDEIDKMDKKEQDKYYKKIKIKTENSIGNKTVGCYIYDHILQNPNEKIKGKLVRTIERKYYKEELKAILEKQVALQPELFTDQLFADCIRELYSKNEAQQRNLAARDFVHLFVEDIIFYQRSLRRQKSTLANCSLESRSYIDKDSHTRKEAPLKVCPKSNPYYQEFRVLQWLQNLKIYEIDTDQEVTHEFIKTLEDKQQFFDFLMNQKEIDCEELLKYFLNQTYPNAREKALKSELKKWKDTYRWNYVYDIGEKSSKKYPMNETRYELKRHLEKVANLPDDFLSSEVEYLLWHLIYSVKDKVAYEKGLKTFAQKHHLDKDSFVESFKKFKPYPSEYGSFSEKAIRKLLPLMRFGSYWDFNHIDKNTQKRIEDLITGVENEEIRTILREKAEKYQLEKETDFQDLPLWLAQYIVYNRHAEASSLEKWTSVNDLETYLNEFKQYSLRNPIVEQVVMETLRVVRDIWQQYGQGQASFFDEIHIELGRELKKTAKEREKLSKQNQKNEDINLSIKEKLKELEKYNTRAYSITHQEKYKLWLEQKHISPYTGQIISPENLFTDNYEIEHIIPQSRFFDDSLSNKVVCESIVNKAPYKDRQLGLEFIKNQGGRIVKELSTENKTIKIFTEEQYRTFIKEHYSNNPEKTKKLLLEEIPEKMVARQMNDTCYISKFISEILSKIVRSDEQDEGVHSKNVILCTGKITSALKQDWGVNDVWNDLILPRFERMNDLTQSTLFTTYNEKYQKYLPTVPMEYSNGFQKKRIDHRHHAMDAIIIACATREHINYINNQHALEKGKDKKEKQKEHDKLREKLCIKKDNKGSEENYSWIFKKPWDTFTQEVQAALEGIVVSFKQNLRVINKATNYYERWVEENGKYIKKMVKQEGTNWAIRKPLHEETISGKIYLDREEITKNDILTATRKTVDSSFDEKRIKKITDTGIQKILLNYLKYKGSPEIAFSPEGLEELNKNLSIYNDGKPHKPIYKVRIYEKGSGRFALGEKGRKYKKYVQGAPNLYFGIYQGANKRSFATIPLNEVIERQKQGRPSIPEYNEKGDPLLFSLSPNDLVYVPVEGEIIEDIDFQNLSKEQKERIYNVNDFSSTCYFTPNRIAKAIFPKEVDLQRKGDKLPGSYDTKTASLEGIQIKEVCIKLKIDRLGNISKA

SEQ ID NO: 388 - protein, 1140 aa, Catellicoccus marimammalium
MKNMTKVNVGLDVGISSAGWSVINAETNQILESGVRLFSGSDADENVNRRNQRQGRRLFRRRKLRIQEAKKYLENVFQLKDIEPKDEWNPYEIRVRALNEKVSKEELSIALLNIVKHRGISYELEDVTDEEGTNTQSFQSGLDYNRRLLKTKTVGEIQYDRLQKYGQVRGQIQTEDGLLINIFPTKNYVEEVERILETQKKYHPEIDDVFIEKIISFVTRKREYFVGPGNEKSRTDYGIYRENGETLDNLFEILIGKDKFYPEEYRAAGSSYTAQIFNLLNDLNNLRIPTTEDHHLTKAQKEEIITELKNTSRLSGGMLKLISKVTKAPKEEISGYRKDEKDKPDLHSLAYYRKQKNMLEKEGIQIADFSEELLDELATMMTLNTEPGEIRKQLNKITNQYDILTPEVIEVLVKNHTAFVATSNHKWHRFSLKLMKEFIPELLETSKEQSTILCERGFIQNRASYLDENHHFNYAELRENLYNPVVRKSTCEMLKVFTAIQEKYPNIQNVIVELPRETNEDEQKRKIKKINDNNAKRKKEILKEAQAQSGLSEEALEEKLLKTKGLYLKLMLWYEQEGKCVYSGQEIPLSDLLQNKGGYEVDHIIPISISFDDRLCNKVLVRQQLNSQKSNQTPFEYMTTHTDGHLSFHELKELVGKNKRFSKEKRELLLAEIYSNDIETRKRFINRNLVDTSYTARIVLNALQQYKKENQLSMNVSVVRGAMTNILRKKVKLDKTRETFHHHAIDASLMAVIPNIEFFKERKEWLPKSANEEVVEVEVSEEETMPEKEFKVKMRLPESFIQDVQILQRNSFAKEEVSGPQTRERNLKIKFSHQVDQKMNRKVADDTIYGTRQAQLGKDKKEETYVIGKIKDIYNYDEYVRFKKRYDKNKESFLMYHHDPQTFEKLEEILAQYPEYIEDEKGKKKKVSPFALYREENGPVTKYAKKNNGPVIKQLKYYDSKLNRKIDISHKYSTKNRQVVLQSLKPYRTDVYRNQDTGEYTLVGIDQNDGKFVNGHYGIPKSRYEEIKANNKLSEHDEFVFSLYKNSMVKVIDENGESIVVRYLSRSMPNRKNNAEIKPVEKYQFEDGEVVPVYGKCRKQMQTVFVKKGWTLLKGNTDILGNTYFVEKESENPKKMIDDK

SEQ ID NO: 389 - protein, 1419 aa, Unknown
  Chryseobacterium sp.
MMIKNILGLDLGTNSIGWALIKQNFENKYGEILGMGSRIIPMSQDVLGEFGKGNSVSQTAARTGYRGVRRLRERFLLRRERLHRVLNVLNFLPEHYASQIDFEKRFGKFKYETEPKLAYNNDGFFFKNSFDEMLGDFKDHQFHLLENGRKVPYDWTIYYLRKKALSQKIEKEELAWILLNFNQKRGYYQLRGEDFEEEKDRVFVRLKVDRVVDSGENIKGKILYDVYFENGWKYEKQIVKTEDWIGRTKEFIVTESILKNGDTKRTFKAVDSEKDWIAIKTKTEQEIDKSHKTVGAYIYEALLQNPKQKIKGKLVRTIERKFYREELKKILERQKEFHPELQSDDLYNDCIRELYRNNEAHQITLSKKDFVHLLLNDLIFYQRPLRSQKSSVSNCTLEFRKYKDENGVEHAQYLKTIPKSNPYYQEFRVWQWMFNLNIYRKDDDTNVTKEFLSSTEDYETLFEFLNNRKEVDQKALLRHFKLNEKTHRWNYVEDKKYPCNETKTMISTRLEKVENYPSDFLTREMEQNIWHIIYSVNDKIEYEKALKSFAHKNNLDENSFFEAFKKFPPFKSEYGSFSEKAIKKLLPLLRLGKYWNWESIDRKSQGRIEKIITGEFDGNIKDKVREKAIHLTAENDFQGLQLWLAQYIVYGRHSEASMIGKWNSADDLEEFLKGFKQHSLRNPIVEQVITETLRVVKDIWLKYGNGAKDFFSEIHIELGREMKQTKDERVDATKRITENENTNLRIKALLAEMMNDNSVENIRPYSPMQQEILKIYEDGILKSDIEIDDDILKISKTAQPSSSDLKRYKLWLEQRYKSPYTGQIIPLNKLFTSEYEIEHIIPQSRYFDDSFSNKIICESAVNKLKDNYIGLGFIKQFGGMIVECGFGKSVEIFKAEEYEDFVKKHYANNRSKRNKLLLEEIPEKMIDRQLNDTRHISKYISGVLSNIVRQEDGTDEGVNSKNIVPGNGKITTQLKQDWGLNDVWNELILPRFERMNQLTNSTDFTSWNKNHQKFLPTVPIEFSKGFSKKRIDHRHHAMDALVIACATKDHINLLNNQSAKSDTKRYDLKRKLMKFERVVYSHSKTGEKIEKEVPKQFLKPWDNFTVDAKNKMETIIVSFKQNLRVINKATNHYEKWIEKDGIKRKELIKQEGTNWAIRKPMHKETVSGKVDLPGIKIPKGKILTATRKSLDTSFDLKTINSITDTGIQKILKNYLEFKGSSELAFSPEGIEDMNKNIEKFNDGKPHQSINKVRIFELGSKFSVGQTGNKKDKYVEAAKGTNLFFAVYEDKNGKRSYETIPLNEVIERQKQGLDSVSFKNKEDFLLCPNDLVYVPSEDELENIYNIDFKNLTTEKTGNIYKVVSFSGNQIFFIRQDIAISIVNKAEFSTLNKMERAIDGSMIKENCIKLKIDRLGNIAKI

SEQ ID NO: 390 - protein, 1065 aa, Clostridium perfringens
MNKDINYALGLDIGITSVGWAVINLDLNRIEDLGVRIFNAAENPKDGSSLALPRRLARGRRRLLRRKAYRVERVRKLIVKNNILTKEELEGLFKNKEVIDVWEARVKGLDYKLSREEWAKILINFCKRRGFKSNRKNETKDKEAGQILSSISYNIEKMKETNSRTIGEYIYNEVKNSDDSYAPLRNKFGEYKMCVSRDVLREEIHTLFEKQRELGNNFASDEIEDKYFEIFNSQRPFSNFEDLEKLVGFCTFERKKHKRAPKHCISSEEFTLYEGINKLSIIKDGEKRKLSEEERTLVVNEAFNKKEIKYTTLRKLLGLSEDELFSTLTYSIDKDISKTENTKFVSLKGYHEIKRAIEKGVSKKAWQDIENNRNLLNDIAYVLTLGKTDDEIEKQLRLRNVPEELFESLLDMSFSKFNNLSIYALEKILPFMKEGYQYNEACEKAGYNFKAIYEGVRTKKLPVIEIDEIVNPVVNRALAQTRKVINSVIDKYGSPVRINIELARDLAKNFKDRKLIEKEQKENRANLDKIRENLRELMDKEPTAVEVLKYRLWEQQRGECAYTQSQIALERLFSPGYCEIDHIIPFSRSFDDSLSNKILVLGSENQRKGNKIPYEYFGEDSERWNSFEIWVKGSYLNYKKKANLLKKKFTEEEQRDWKARNLQDTKYICRYISNFVNNRLEFKESENKQKVITVNGRATAYLRSRWGLNKVREDGDKHHALDAAVVGVTTQGMVQKISKYSKAHELYTVRKNDEFVDVETGECVDVDEYKEIRKDILPRPWRGFSEELKLRLSDNPLEELKKLPIETYNEEFIKENVKPIFVSRVPFRKISGKLFKETIYSERAFKDGYFVSKKSLVDLKRGDLDNFYNYECDKKLYDAISERMKEFNYNGKKAFESPFRKPTKSGKEGPVVRSVKIKSAAPFKDGIPMNEGLVAKEGMVRIDIYEKEGKYFVVPVYRYQLAKGIVPKRAAIAGKSELKWPIMDQTYNFKFSIFKNDLIEIKYAKKDGYFGYYDGFDRHTASLVIENHDNSDRYRGIGVKTGVVEFNKYEVDVLGNYHKVNLGGN

SEQ ID NO: 391 - protein, 1099 aa, Corynebacterium accolens
MSLSYRVGIDVGTYSLGCTAIEVDDNDQPVNILSSVSLIHDSGLDPDQQKRAVTRLASSGVARRTRRLYRRRRRRMINLEKFLTSQGWETRPFEHYSDPYLPWNARVALVNGYISDDAQRGMYLSIAFRHIANHRGWRNPYWKVSSLYSPDKPSDAFEQIRKELEESTGHKIPETVTVGQLISFAQFGKDRLRGGGKKKDEKKPQEQVNQAVISARLHQIDHAREINEICRVQKIDDALRKQILDLVFAAESPKGAQIGRVGKDPLQPKLPRALKASDAFQQYRIVALAGNLRIYRDGVSTPLDRDEKLIVFNYLINLSHKEEPSWLKVAEVLNIDRGQLHGTATMTDDGERAGAAPPVHDTNRTILGCKIKPLVHWWEGANDDERAAMLKALSNSEVEDFDSPAGAQTQAFFANLDESEQEKLDSLHLPIGRAAYSEDTLMRLTSRMLDENLDLYEARLAEFDIPKDWAPPAPRIGEPVGNPAVDRVLKGVARWLEAAADEWGAPKSVVIEHVRDGFISKSKANEIDRANNARHKRNRELFKQMQENLGIDGKLRSSDLWRYQSVQRQNCQCAYCGSPITYTTCEMDHIVPRAGEGSTNTRDNLVATCHRCNLAKKNIPFAVWAAQTNIPGVSVKEALDRTRHWSEDSGMTSKDFKKFRKNVCDRLKRTVVDEPLDARSMESVAWMANELRGRVAQRFQEENTVVNVYRGELTAEARRAAGISDKLRFIDGTGKSRLDRRHHAVDAAVVAFTQNYVAETLAIRSNKKREAQLLQAAEQWKEFTGSDAEHRAAWNAWLPKMQKLAVLLQKALDEDRIAVTSNLRLRLGNGRAHEDSIGELKTIRVGDAISVTDIDRASSEALWCALTREPDFDENNGLPENPDRRIRIHGTWYDAEDDIEVFPVGAGAIKVRGGYAELSRFHHARIYKIPGKKAPVYCMLRVYNADLIRHRHEDLFSVEIKPQTMSVRQAEPKLRKALAENTAEYLGWLVTDDELVIDTSNFNTGQIAEMQSELGQVRRWRLDGFYSPSTLRLRPLQMSAEGLREDTSIGAKKIIDRPGWLPAINKLFGEGHVTVVRRDALGRARLTSNAHLPISWKAE

SEQ ID NO: 392 - protein, 1084 aa, Corynebacterium diphtheriae
MKYHVGIDVGTFSVGLAAIEVDDAGMPIKTLSLVSHIHDSGLDPDEIKSAVTRLASSGIARRTRRLYRRKRRRLQQLDKFIQRQGWPVIELEDYSDPLYPWKVRAELAASYIADEKERGEKLSVALRHIARHRGWRNPYAKVSSLYLPDGPSDAFKAIREEIKRASGQPVPETATVGQMVTLCELGTLKLRGEGGVLSARLQQSDHAREIQEICRMQEIGQELYRKIIDVVFAAESPKGSASSRVGKDPLQPGKNRALKASDAFQRYRIAALIGNLRVWVDGEKRILSVEEKNLVFDHLVNLTPKKEPEWVTIAEILGIDRGQLIGTATMTDDGERAGARPPTHDTNRSIVNSRIAPLVDWWKTASALEQHAMVKALSNAEVDDFDSPERAKVQAFFADLDDDVHAKLDSLHLPVGRAAYSEDTLVRLTRRMLSDGVDLYTARLQEFGIEPSWTPPTPRIGEPVGNPAVDRVLKTVSRWLESATKTWGAPERVIIEHVREGFVTEKRAREMDGDMRRRAARNAKLFQEMQEKLNVQGKPSRADLWRYQSVQRQNCQCAYCGSPITFSNSEMDHIVPRAGQGSTNTRENLVAVCHRCNQSKGNTPFAIWAKNTSIEGVSVKEAVERTRHWVTDTGMRSTDFKKFTKAVVERFQRATMDEEIDARSMESVAWMANELRSRVAQHFASHGTTVRVYRGSLTAEARRASGISGKLEFLDGVGKSRLDRRHHAIDAAVIAFTSDYVAETLAVRSNLKQSQAHRQEAPQWREFTGKDAEHRATWRVWCQKMEKLSALLTEDLRDDRVVVMSNVRLRLGNGSAHEETIGKLSKVKLGSQLSVSDIDKASSEALWCALTREPDFDPKDGLPANPERHIRVNGTHVYAGDNIGLFPVSAGSIALRGGYAELGSSFHHARVYKITSGKKPAFAMLRVYTIDLLPYRNQDLFSVELKPQTMSMRQAEKKLRDALATGNAEYLGWLVVDDELVVDTSKIATDQVKAVEAELGTIRRWRVDGFFGDTRLRLRPLQMSKEGIKKESAPELSKIIDRPGWLPAVNKLFSEGNVTVVRRDSLGRVRLESTAHLPVTWKVQ

SEQ ID NO: 393 - protein, 1084 aa, Corynebacterium diphtheriae
MKYHVGIDVGTFSVGLAAIEVDDAGMPIKTLSLVSHIHDSGLDPDEIKSAVTRLASSGIARRTRRLYRRKRRRLQQLDKFIQRQGWPVIELEDYSDPLYPWKVRAELAASYIADEKERGEKLSVALRHIARHRGWRNPYAKVSSLYLPDGPSDAFKAIREEIKRASGQPVPETATVGQMVTLCELGTLKLRGEGGVLSARLQQSDHAREIQEICRMQEIGQELYRKIIDVVFAAESPKGSASSRVGKDPLQPGKNRALKASDAFQRYRIAALIGNLRVRVDGEKRILSVEEKNLVFDHLVNLAPKKEPEWVTIAEILGIDRGQLIGTATMTDDGERAGARPPTHDTNRSIVNSRIAPLVDWWKTASALEQHAMVKALSNAEVDDFDSPEGAKVQAFFADLDDDVHAKLDSLHLPVGRAAYSEDTLVRLTRRMLADGVDLYTARLQEFGIEPSWTPPAPRIGEPVGNPAVDRVLKTVSRWLESATKTWGAPERVIIEHVREGFVTEKRAREMDGDMQRRAARNAKLFQEMQEKLNVQGKPSRADLWRYQSVQRQNCQCAYCGSPITFSNSEMDHIVPRAGQGSTNTRENLVAVCHRCNQSKGNTPFAIWAKNTSIEGVSVKEAVERTRHWVTDTGMRSPDFKKFTKAVVERFQRATMDEEIDARSMESVAWMANELRSRVAQHFASHGTTVRVYRGSLTAEARRASGISGKLKFFDGVGKSRLDRRHHAIDAAVIAFTSDYVAETLAVRSNLKQSQAHRQEAPQWREFTGKDAEHRAAWRVWCQKMEKLSALLTEDLRDDRVVVMSNVRLRLGNGSAHKETIGKLSKVKLGSQLSVSDIDKASSEALWCALTREPDFDPKEGLPANPERHIRVNGTHVYAGDNIGLFPVSAGSIALRGGYAELGSSFHHARVYKITSGKKPAFAMLRVYTIDLLPYRNQDLFSVELKPQTMSMRQAEKKLRDALATGNAEYLGWLVVDDELVVDTSKIATDQVKAVEAELGTIRRWRVDGFFSPSKLRLRPLQMSKEGIKKESAPELSKIIDRPGWLPAVNKLFSDGNVTVVRRDSLGRVRLESTAHLPVTWKVQ

SEQ ID NO: 394 - protein, 1084 aa, Corynebacterium diphtheriae
MKYHVGIDVGTFSVGLAAIEVDDAGMPIKTLSLVSHIHDSGLDPDKIKSAVTRLASSGIARRTRRLYRRKRRRLQQLDKFIQRQGWPVIELEDYSDPLYPWKVRAELAASYIADEKERGEKLSVALRHIARHRGWRNPYAKVSSLYLPDEPSDAFKAIREEIKRASGQPVPETATVGQMVTLCELGTLKLRGEGGVLSARLQQSDHAREIQEICRMQEIGQELYRKIIDVVFAAESPKGSASSRVGKDPLQPGKNRALKASDAFQRYRIAALIGNLRVRVDGEKRILSVEEKNLVFDHLVNLAPKKEPEWVTIAEILGIDRGQLIGTATMTDDGERAGARPPTHDTNRSIVNSRIAPLVDWWKTASALEQHAMVKALSNAEVDDFDSPEGAKVQAFFADLDDDVHAKLDSLHLPVGRAAYSEDTLVRLTRRMLADGVDLYTARLQEFGIEPSWTPPAPRIGEPVGNPAVDRVLKTVSRWLKSATKTWGAPERVIIEHVREGFVTEKRAREMDGDMRRRAARNAKLFQEMQEKLNVQGKPSRADLWRYQSVQRQNCQCAYCGSPITFSNSEMDHIVPRAGQGSTNTRENLVAVCHRCNQSKGNTPFAIWAKNTSIEGVSVKEAVERTRHWVTDTGMRSTDFKKFTKAVVERFQRATMDEEIDARSMESVAWMANELRSRVAQHFASHGTTVRVYRGSLTAEARRASGISGKLEFLDGVGKSRLDRRHHAIDAAVIAFTSDYVAETLAVRSNLKQSQAHRQEAPQWREFTGKDAEHRAAWRVWCQKMEKLSALLTEDLRDDRVVVMSNVRLRLGNGSAHEETIGKLSKVKLGSQLSVSDIDKASSEALWCALTREPDFDPKDGLPANPERHIRVNGTHVYAGDNIGLFPVSAGSIALRGGYAELGSSFHHARVYKITSGKKPAFAMLRVYTIDLLPYRNQDLFSVELKPQTMSMRQAEKKLRDALATGNAEYLGWLVVDDELVVDTSKIATDQVKAVEAELGTIRRWRVDGFFGDTRLRLRPLQMSKEGIKKESAPELSKIIDRPGWLPAVNKLFSEGNVTVVRRDSLGRVRLESTAHLPVTWKVQ

SEQ ID NO: 395 - protein, 1084 aa, Corynebacterium diphtheriae
MKYHVGIDVGTFSVGLAAIEVDDAGMPIKTLSLVSHIHDSGLDPDKIKSAVTRLASSGIARRTRRLYRRKRRRLQQLDKFIQRQGWPVIELEDYSDPLYPWKVRAELAASYIADEKERGEKLSVALRHIARHRGWRNPYAKVSSLYLPDEPSDAFKAIREEIKRASGQPVPETATVGQMVTLCELGTLKLRGEGGVLSARLQQSDHAREIQEICRMQEIGQELYRKIIDVVFAAESPKGSASSRVGKDPLQPGKNRALKASDAFQRYRIAALIGNLRVRVDGEKRILSVEEKNLVFDHLVNLAPKKEPEWVTIAEILGIDRGQLIGTATMTDDGERAGARPPTHDTNRSIVNSRIAPLVDWWKTASALEQHAMVKALSNAEVDDFDSPEGAKVQAFFADLDDDVHAKLDSLHLPVGRAAYSEDTLVRLTRRMLADGVDLYTARLQEFGIEPSWTPPAPRIGEPVGNPAVDRVLKTVSRWLESATKTWGAPERVIIEHVREGFVTEKRAREMDGDMRRRAARNAKLFQEMQEKLNVQGKPSRADLWRYQSVQRQNCQCAYCGSPITFSNSEMDHIVPRAGQGSTNTRENLVAVCHRCNQSKGNTPFAIWAKNTSIEGVSVKEAVERTRHWVTDTGMRSTDFKKFTKAVVERFQRATMDEEIDARSMESVAWMANELRSRVAQHFASHGTTVRVYRGSLTAEARRASGISGKLEFLDGVGKSRLDRRHHAIDAAVIAFTSDYVAETLAVRSNLKQSQAHRQEAPQWREFTGKDAEHRAAWRVWCQKMEKLSALLTEDLRDDRVVVMSNVRLRLGNGSAHEETIGKLSKVKLGSQLSVSDIDKASSEALWCALTREPDFDPKDGLPANPERHIRVNGTHVYAGDNIGLFPVSAGSIALRGGYAELGSSFHHARVYKITSGKKPAFAMLRVYTIDLLPYRNQDLFSVELKPQTMSMRQAEKKLRDALATGNAEYLGWLVVDDELVVDTSKIATDQVKAVEAELGTIRRWRVDGFFGDTRLRLRPLQMSKEGIKKESAPELSKIIDRPGWLPAVNKLFSEGNVTVVRRDSLGRVRLESTAHLPVTWKVQ

SEQ ID NO: 396 - protein, 1084 aa, Corynebacterium diphtheriae
MKYHVGIDVGTFSVGLAAIEVDDAGMPIKTLSLVSHIHDSGLDPDKMKSAVTRLASSGIARRTRRLYRRKRRRLQQLDKFIQRQGWPVIELEDYSDPLYPWKVRAELAASYIADEKERGEKLSVALRHIARHRGWRNPYAKVSSLYLPDEPSDAFKSIREEIKRASGQPVPETATVGQMVTLCELGTLKLRGEGGVLSARLQQSDHAREIQEICRMQEIGQELYRKIIDVVFAAESPKGSASSRVGKDPLQPGKNRALKASDSFQRYRIAALISNLRVRVDGEKRILSVEEKNLVFDHLVNLAPKKEPEWVTIAEILGIDRGQLIGTATMTDDGERAGARPPTHDTNRSIVNSRIAPLVDWWKTASALEQHAMVKALSNAEVDDFDSPEGAKVQAFFADLDDDVHAKLDSLHLPVGRAAYSEDTLVRLTRRMLADGVDLYTARLQEFGIEPSWTPPAPRIGEPVGNPAVDRVLKTVSRWLESATKTWGAPERVIIEHVRDGFVTEKRAREMDGDMRRRAARNAKLFQEMQEKLNVQGKPSRADLWRYQSVQRQNCQCAYCGSPITFSNSEMDHIVPRAGQGSTNTRENLVAVCHRCNQSKGNTPFAIWAKNTSIEGVSVKEAVERTRHWVTDTGMRSTDFKKFTKAVVERFQRATMDEEIDARSMESVAWMANELRSRVAQHFASHGTTVRVYRGSLTAEARRASGISGKLEFLDGVGKSRLDRRHHAIDAAVIAFTSDYVAETLAVRSNLKQSQAHRQEAPQWREFTGKDAEHRAAWRVWCQKMEKLSALLTEDLRDDRVVVMSNVRLRLGNGSAHEETIGKLSKVKLGSQLSVSDIDKASSEALWCALTREPDFDPKDGLPANPERHIRVNGTHVYAGDNIGLFPVSAGSIALRGGYAELGSSFHHARVYKITSGKKPAFAMLRVYTIDLLPYRNQDLFSVELKPQTMSMRQAEKKLRDALATGNAEYLGWLVVDDELVVDTSKIATDQVKAVEAELGTIRRWRVDGFFGDTRLRLRPLQMSKEGIKKELAPELSKIIDRPGWLPAVNKLFSEGNVTVVRRDSLGRVRLESTAHLPVTWKVQ

SEQ ID NO: 397 - protein, 1084 aa, Corynebacterium diphtheriae
MKYHVGIDVGTFSVGLAAIEVDDAGMPIKTLSLVSHIHDSGLDPDKMKSAVTRLASSGIARRTRRLYRRKRRRLQQLDKFIQRQGWPVIELEDYSDPLYPWKVRAELAASYIADEKERGEKLSVALRHIARHRGWRNPYAKVSSLYLPDEPSDAFKSIREEIKRASGQPVPETATVGQMVTLCELGTLKLRGEGGVLSARLQQSDHAREIQEICRMQEIGQELYRKIIDVVFAAESPKGSASSRVGKDPLQPGKNRALKASDAFQRYRIAALIGNLRVRVDGEKRILSVEEKNLVFDHLVNLAPKKEPEWVTIAEILGIDRGQLIGTATMTDDGERAGARPPTHDTNRSIVNSRIAPLVDWWKTASALEQHAMVKALSNAEVDDFDSPEGAKVQAFFADLDDDVHAKLDSLHLPVGRAAYSEDTLVRLTRRMLADGVDLYTARLQEFGIEPSWTPPAPRIGEPVGNPAVDRVLKTVSRWLESATKTWGAPERVIIEHVREGFVTEKRAREMDGDMRRRAARNAKLFQEMQEKLNVQGKPSRADLWRYQSVQRQNCQCAYCGSPITFSNSEMDHIVPRAGQGSTNTRENLVAVCHRCNQSKGNTPFAIWAKNTSIEGVSVKEAVERTRHWVTDTGMRSTDFKKFTKAVVERFQRATMDEEIDARSMESVAWMANELRSRVAQHFASHGTTVRVYRGSLTAEARRASGISGKLEFLDGVGKSRLDRRHHAIDAAVIAFTSDYVAETLAVRSNLKQSQAHRQEAPQWREFTGKDAEHRAAWRVWCQKMEKLSALLTEDLRDDRVVVMSNVRLRLGNGSAHEETIGKLSKVKLGSQLSVSDIDKASSEALWCALTREPDFDPKDGLPANPERHIRVNGTHVYAGDNIGLFPVSAGSIALRGGYAELGSSFHHARVYKITSGKKPAFAMLRVYTIDLLPYRNQDLFSVELKPQTMSMRQAEKKLRDALATGNAEYLGWLVVDDELVVDTSKIATDQVKAVEAELGTIRRWRVDGFFGDTRLRLRPLQMSKEGIKKESAPELSKIIDRPGWLPAVNKLFSEGNVTVVRRDSLGRVRLESTAHLPVTWKVQ

SEQ ID NO: 398 - protein, 1084 aa, Corynebacterium diphtheriae
MKYHVGIDVGTFSVGLAAIEVDDAGMPIKTLSLVSHIHDSRLDPDKIKSAVTRLASSGIARRTRRLYRRKRRRLQQLDKFIQRQGWPVIELEDYSDPLYPWKVRAELAASYIADEKERGEKLSVALRHIARHRGWRNPYAKVSSLYLPDEPSDAFKAIREEIKRASGQPVPETATVGQMVTLCELGTLKLRGEGGVLSARLQQSDHAREIQEICRMQEIGQELYRKIIDVVFAAESPKGSASSRVGKDPLQPGKNRALKASDAFQRYRIAALIGNLRVRVDGEKRILSVEEKNLVFDHLVNLAPKKEPEWVTIAEILGIDRGQLIGTATMTDDGERAGARPPTHDTNRSIVNSRIAPLVDWWKTASALEQHAMVKALSNAEVDDFDSPEGAKVQAFFADLDDDVHAKLDSLHLPVGRAAYSEDTLVRLTRRMLADGVDLYTARLQEFGIEPSWTPPAPRIGEPVGNPAVDRVLKTVSRWLESATKTWGAPERVIIEHVREGFVTEKRAREMDGDMRRRAARNAKLFQEMQEKLNIQGKPSRADLWRYQSVQRQNCQCAYCGSPITFSNSEMDHIVPRAGQGSTNTRENLVAVCHRCNQSKGNTPFAIWAKNTSIEGVSVKEAVERTRHWVTDTGMRSTDFKKFTKAVVERFQRVTMDEEIDARSMESVAWMANELRSRVAQHFASRGTTVRVYRGSLTAEARRASGISGKLEFLDGVGKSRLDRRHHAIDAAVIAFTSDYVAETLAVRSNLKQSQAHRQEAPQWREFTGKDAEHRAAWRVWCQKMEKLSALLTEDLRDDRVVVMSNVRLRLGNGSAHEETIGKLSKVKLGSQLSVSDIDKASSEALWCALTREPDFDPKDGLPANPERHIRVNGTHVYAGDNIGLFPVSAGSIALRGGYAELGSSFHHARVYKITSGKKPAFAMLRVYTIDLLPYRNQDLFSVELKPQTMSMRQAEKKLRDALATGNAEYLGWLVVDDELVVDTSKIATDQVKAVEAELGTIRRWRVDGFFGDTRLRLRPLQMSKEGIKKESAPELSKIIDRPGWLPAVNKLFSEGNVTVVRRDSLGRVRLESTAHLPVTWKVQ

SEQ ID NO: 399 - protein, 1069 aa, Corynebacterium matruchotii
MAAIAIDDDGKPTEILSAISLIHDSGVDPDSAKSAATRLATSGIARRTRRLYRRKRKRLAKLDKFISSQGWPLKEFEKYEDPFYPWRVRAELATTAITDQQELGEKLSIALRHIARHRGWRNPYSKVTALYTVTEPSDAFLAMQEECAKQLGRTIPETITVGQLVTGMNLGKTRLRGENSLLAARPRQSDNANEIHTIAKVQGLSNELVRQIIDHVFAAESPKGSAAEQVGKDPLQPTKKRALKASDAFQQYRIAALIGNLRIRGGKGNRRLTTEETRLVFDYLRSLPAKQEPTWQLVAEQLKIDRGNLVGTAIMTDDGERAGAKPPVHDTNRIMENTKIKPLATWWKSADADARAAMVKALSNAEVDDFDSQAGAQVQEFFFGISDEDQEKLDGLHLPIGRAAYSEDTLDRLTKRMIGEGMDLYEARQAEFKISNDWAPPAPEIGERVGNPAVDRVLKATARWLNAAERQWGAPKSVNIEHVRAAFMSESSARELDRDNQQRAKRNVKVVAEMQEKLGIEGRPSRADVWRFQSIQRQNGKCAYCGAEISFKNSEMDHIIPQVGEGSTNTRDNLVAVCRECNSSKSNIAFAVWAENTSRPGVSVQKAIERTHHWVTDSGLRKPEFDKFRKQVCDRLRRKATDEPIDARSLESVAWMANELRSRIAQKFKDGDTKVRVYKGALTAEARRASGISGKLEFVDGKGKSRLDRRHHAVDAAVVAFTSNYVAETLALRSNMKFDQELRRKAPQWREFTGSDHVHQVEWTKWKYRMQALAELLNNALVQDRIVVMHNLRLRLGNGAAHEDTIGKLTRLKVGDAISTTDIDRASSEALWCALTRDPDYDPKTGLPENPNRTIRIHGTHLTASDEITVFPVAAASIPIRDGFAKLGSNYHHVRLFRVPSGKKYKYCLMQVYTVDLLKFRKEDLFTVELKPQTISVRTCEALLRKALANGTAEYLGWLVSDDELLIDTSSFDTPGIVKLREEYGPVNRWRLAGLTSVTRLNLRPLYLSKEGLKPNVNPEIKKIIDNRSWIITVNKLFSSGHVKIIRRDALGRPRLHSAAHLPICWEVK

SEQ ID NO: 400 - protein, 210 aa, Diplosphaera colitermitum
MSDILDKPIVLSLNRAWQVIGHRTVKQALVALNGGNADLPPALGLDIAYPKFDDGAWNFDRPLFLNPLPWSEWIELPVRDFDFAITTPRLRIRVPTVIVATQFAKMPVRIPRLTREAIFERDGGVCQYTGEHVGKHGGNLDHVVPRDRGGRDSFENLVWAKREINSLKANRLPHEAGLRLLRRPKAPAPLPASMTIREARHPDWRHFLTP

SEQ ID NO: 401 - protein, 1332 aa, Dolosigranulum pigrum
MQKNYTIGLDIGTNSVGWAVMKDDYTLIRKRMKVLGNTDIKKIKKNFWGVRLFDEGETAKETRLKRGTRRRYQRRRNRLIYLQDIFQQPMLAIDENFFHRLDDSFFVPDDKSYDRHPIFGSLEEEVAYHNTYPTIYHLRKHLADNPEKADLRLVYTALAHIVKYRGHFLIEGELNTENTSISETFEQFLDTYSDIFKEQLVGDISKVEEILSSKQSRSRKHEQIMALFPNENKLGNFGRFMMLIVGNTSNFKPVFDLDDEYKLKLSDETYEEDLDTLLGMTDDVFLDVFMAAKNVYDAVEMSAIISTDTGNSKAVLSNQMINFYDEHKVDLAQLKQFFKTHLPDKYYECFSDPSKNGYAGYIDGKTNQEDFYKYIEKVMKTIKSDKKDYFLDKIDREVFLRKQRSFYNSVIPHQIHLQEMQAILDRQSQYYPFLAENRDKIESLVTFRIPYYVGPLTVSDQSEFAWMERQSDEPIRPWNFDEIVNKERSAEKFIERMTNMDTYLLEEKVLPKRSLLYQTFEVYNELTKVRYTNEQGKTEKLNRQQKAEIIETLFKQKNRVREKDIANYLEQYGYVDGTDIKGVEDKFNASLSTYNDLAKIDGAKAYLDDPEYADVWEDIIKILTIFEDKAMRKKQLQTYSDTLSPEILKKLERKHYTGWGRFSKKLINGLRDEGSNKTILDYLKSDEGSSGPTNRNFMQLIRDNTLSFKKKIEDAQTIEDTTHIYDTVAELPGSPAIKKGIRQALKIVEEIIDIIGYEPENIVVEMARESQTTKKGKDLSKERLEKLTEAIKEFDGPSDVKVKDLKNENLRNDRLYLYYLQNGRDMYTNEPLDINNLSKYDIDHIIPQSFTTDNSIDNKVLVSRTKNQGNKSDDVPSINIVHKMKPFWRQLHKAGLISDRKFKNLTKAEHGGLTEADRAHFLNRQLVETRQITKHVANLLDSQYNTAEEQRINIVLLKSSMTSRFRKEFKLYKVREINDYHHGHDAYLNAVVATTIMKVYPNLKPQFVYGQYKKTSMFKEEKATARKHFYSNITKFFKKEKVVNEETGEILWDTERHLSTIKRVLSWKQMNIVKKVEKQKGQLWKETIYPKGDSSKLIPVKEGMDPQKYGGLSQVSEAFAVVITHEKGKKKQLKSDLISIPIVDQKAYEQHPTAYLEEAGYNNPTVLHELFKYQLFELEDGSRRMIASAKEFQKGNQMVLPLELVELLYHANRYDKVKFPDSIEYVHDNLAKFDDLLEYVIDFSNKYINADKNVQKIQKIYKEHGTEDVELTVESFVNLMTFTAMGAPATFKFYGESITRSRYTSITEFRGSTLIFQSITGLYETRYKLEDN

SEQ ID NO: 402 - protein, 921 aa, Enterococcus faecalis
MIPHQIHLAELQAIIHRQAAYYPFLKENQEKIEQLVTFRIPYYVGPLSKGDASTFAWLKRQSEEPIRPWNLQETVDLDQSATAFIERMTNFDTYLPSEKVLPKHSLLYEKFMVFNELTKISYTDDRGIKANFSGKEKEKIFDYLFKTRRKVKKKDIIQFYRNEYNTEIVTLSGLEEDQFNASFSTYQDLLKCGLTRAELDHPDNAEKLEDIIKILTIFEDRQRIRTQLSTFKGQFSAEVLKKLERKHYTGWGRLSKKLINGIYDKESGKTILGYLIKDDGVSKHYNRNFMQLINDSQLSFKNAIQKAQSSEHEETLSETVNELAGSPAIKKGIYQSLKIVDELVAIMGYAPKRIVVEMARENQTTSTGKRRSIQRLKIVEKAMAEIGSNLLKEQPTTNEQLRDTRLFLYYMQNGKDMYTGDELSLHRLSHYDIDHIIPQSFMKDDSLDNLVLVGSTENRGKSDDVPSKEVVKDMKAYWEKLYAAGLISQRKFQRLTKGEQGGLTLEDKAHFIQRQLVETRQITKNVAGILDQRYNANSKEKKVQIITLKASLTSQFRSIFGLYKVREVNDYHHGQDAYLNCVVATTLLKVYPNLAPEFVYGEYPKFQTFKENKATAKAIIYTNLLRFFTEDEPRFTKDGEILWSNSYLKTIKKELNYHQMNIVKKVEVQKGGFSKESIKPKGPSNKLIPVKNGLDPQKYGGFDSPIVAYTVLFTHEKGKKPLIKQEILGITIMEKTRFEQNRILFLEEKGFLRPRVLMKLPKYTLYEFPEGRRRLLASAKEAQKGNQMVLPEHLLTLLYHAKQCLLPNQSESLTYVEQHQPEFQEILERVVDFAEVHTLAKSKVQQIVKLFEANQTADVKEIAASFIQLMQFNAMGAPSTFKFFQKDIERARYTSIKEIFDATIIYQSTTGLYETRRKVVD

SEQ ID NO: 403 - protein, 1337 aa, Enterococcus faecalis; identical to SEQ ID NO: 115

SEQ ID NO: 404 - protein, 1337 aa, Enterococcus faecalis
MKKDYVIGLDIGTNSVGWAVMTEDYQLVKKKMPIYGNTEKKKIKKNFWGVRLFEEGHTAEDRRLKRTARRRISRRRNRLRYLQAFFEEAMTALDENFFARLQESFLVPEDKKWHRHPIFAKLEDEVAYHETYPTIYHLRKKLADSSEQADLRLIYLALAHIVKYRGHFLIEGKLSTENISVKEQFQQFMIIYNQTFVNGESRLVSAPLPESVLIEEELTEKASRTKKSEKVLQQFPQEKANGLFGQFLKLMVGNKADFKKVFGLEEEAKITYASESYEEDLEGILAKVGDEYSDVFLAAKNVYDAVELSTILADSDKKSHAKLSSSMIVRFTEHQEDLKNFKRFIRENCPDEYDNLFKNEQKDGYAGYITHAGKVSQLKFYQYVKKIIQDIAGAEYFLEKIAQENFLRKQRTFDNGVIPHQIHLAELQAIIHRQAAYYPFLKENQEKIEQLVTFRIPYYVGPLSKGDANTFAWLKRQSEEPIRPWNLQETVDLDQSATAFIERMTNFDTYLPSEKVLPKHSLLYEKFMVFNELTKISYTDDRGIKANFSGKEKEKIFDYLFKTRRKVKKKDIIQFYRNEYNTEIVTLSGLEEDQFNASFSTYQDLLKCGLTRAELDHPDNAEKLEDIIKILTIFEDRQRIRTQLSTFKGQFSAEVLKKLERKHYTGWGRLSKKLINGIYDKESGKTILDYLIKDDGVSKHYNRNFMQLINDSQLSFKNAIQKAQSSEHEETLSETVNELAGSPAIKKGIYQSLKIVDELVAIMGYAPKRIVVEMARENQTTSTGKRRSIQRLKIVEKAMAEIGSNLLKEQPTTNEQLRDTRLFLYYMQNGKDMYTGDELSLHRLSHYDIDHIIPQSFMKDDSLDNLVLVGSTENRGKSDDVPSKEVVKDMKAYWEKLYAAGLISQRKFQRLTKGEQGGLTLEDKAHFIQRQLVETRQITKNVAGILDQRYNAKSKEKKVQIITLKASLTSQFRSIFGLYKVREVNDYHHGQDAYLNCVVATTLLKVYPNLAPEFVYGEYPKFQTFKENKATAKAIIYTNLLRFFTEDEPRFTKDGEILWSNSYLKTIKKELNYHQMNIVKKVEVQKGGFSKESIKPKGPSNKLIPVKNGLDPQKYGGFDSPIVAYTVLFTHEKGKKPLIKQEILGITIMEKTRFEQNPILFLEEKGFLRPRVLMKLPKYTLYQFPEGRRRLLASAKEAQKGNQMVLPEHLLTLLYHAKQCLLPNQSESLAYVEQHQPEFQEILERVVDFAEVHTLAKSKVQQIVKLFEANQTADVKEIAASFIQLMQFNAMGAPSTFKFFQKDIERARYTSIKEIFDATIIYQSTTGLYETRRKVVD

SEQ ID NO: 405 - protein, 1337 aa, Enterococcus faecalis
MKKDYVIGLDIGTNSVGWAVMTEDYQLVKKKMPIYGNTEKKKIKKNFWGVRLFEEGHTAEDRRLKRTARRRISRRRNRLRYLQAFFEEAMTALDENFFARLQESFLVPEDKKWHRHPIFAKLEDEVAYHETYPTIYHLRKKLADSSEQADLRLIYLALAHIVKYRGHFLIEGKLSTENISVKEQFQQFMIIYNQTFVNGESRLVSTPLPESVLIEEELTEKASRTKKSEKVLQQFPQEKANGLFGQFLKLMVGNKADFKKVFGLEEEAKITYASESYEEDLEGILAKVGDEYSDVFLAAKNVYDAVELSTILADSDKKSHAKLSSSMIVRFTEHQEDLKNFKRFIRENCPDEYDNLFKNEQKDGYAGYITHAGKVSQLKFYQYVKKIIQDIAGAEYFLEKIAQENFLRKQRTFDNGVIPHQIHLAELQAIIHRQAAYYPFLKENQEKIEQLVTFRIPYYVGPLSKGDASTFAWLKRQSEEPIRPWNLQETVDLDQSATAFIERMTNFDTYLPSEKVLPKHSLLYEKFMVFNELTKISYTDDRGIKANFSGKEKEKIFDYLFKTRRKVKKKDIIQFYRNEYNTEIVTLSGLEEDQFNASFSTYQDLLKCGLTRAELDHPDNAEKLEDIIKILTIFEDRQRIRTQLSTFKGQFSAEVLKKLERKHYTGWGRLSKKLINGIYDKESGKTILDYLVKDDGVSKHYNRNFMQLINDSQLSFKNAIQKAQSSEHEETLSETVNELAGSPAIKKGIYQSLKIVDELVAIMGYAPKRIVVEMARENQTTSTGKRRSIQRLKIVEKAMAEIGSNLLKEQPTTNEQLRDTRLFLYYMQNGKDMYTGDELSLHRLSHYDIDHIIPQSFMKDDSLDNLVLVGSTENRGKSDDVPSKEVVKDMKAYWEKLYAAGLISQRKFQRLTKGEQGGLTLEDKAHFIQRQLVETRQITKNVAGILDQRYNAKSKEKKVQIITLKASLTSQFRSIFGLYKVREVNDYHHGQDAYLNCVVATTLLKVYPNLAPEFVYGEYPKFQTFKENKATAKAIIYTNLLRFFTEDEPRFTKDGEILWSNSYLKTIKKELNYHQMNIVKKVEVQKGGFSKESIKPKGPSNKLIPVKNGLDPQKYGGFDSPIVAYTVLFTHEKGKKPLIKQEILGITIMEKTRFEQNPILFLEEKGFLRPRVLMKLPKYTLYEFPEGRRRLLASAKEAQKGNQMVLPEHLLTLLYHAKQCLLPNQSESLAYVEQHQPEFQEILERVVDFAEVHTLAKSKVQQIVKLFEANQTADVKEIAASFIQLMQFNAMGAPSTFKFFQKDIERARYTSIKEIFDATIIYQSTTGLYETRRKVVD

SEQ ID NO: 406 - protein, 1337 aa, Enterococcus faecalis
MKKDYVIGLDIGTNSVGWAVMTEDYQLVKKKMPIYGNTEKKKIKKNFWGVRLFEEGHTAEDRRLKRTARRRISRRRNRLRYLQAFFEEAMTDLDENFFARLQESFLVPEDKKWHRHPIFAKLEDEVAYHETYPTIYHLRKKLADSSEQADLRLIYLALAHIVKYRGHFLIEGKLSTENISVKEQFQQFMIIYNQTFVNGESRLVSAPLPESVLIEEELTEKASRTKKSEKVLQQFPQEKANGLFGQFLKLMVGNKADFKKVFGLEEEAKITYASESYEEDLEGILAKVGDEYSDVFLAAKNVYDAVELSTILADSDKKSHAKLSSSMIVRFTEHQEDLKKFKRFIRENCPDEYDNLFKNEQKDGYAGYIAHAGKVSQLKFYQYVKKIIQDIAGAEYFLEKIAQENFLRKQRTFDNGVIPHQIHLAELQAIIHRQAAYYPFLKENQEKIEQLVTFRIPYYVGPLSKGDASTFAWLKRQSEEPIRPWNLQETVDLDQSATAFIERMTNFDTYLPSEKVLPKHSLLYEKFMVFNELTKISYTDDRGIKANFSGKEKEKIFDYLFKTRRKVKKKDIIQFYRNEYNTEIVTLSGLEEDQFNASFSTYQDLLKCGLTRAELDHPDNAEKLEDIIKILTIFEDRQRIRTQLSTFKGQFSAEVLKKLERKHYTGWGRLSKKLINGIYDKESGKTILGYLIKDDGVSKHYNRNFMQLINDSQLSFKNAIQKAQSSEHEETLSETVNELAGSPAIKKGIYQSLKIVDELVAIMGYAPKRIVVEMARENQTTSTGKRRSIQRLKIVEKAMAEIGSNLLKEQPTTNEQLRDTRLFLYYMQNGKDMYTGDELSLHRLSHYDIDHIIPQSFMKDDSLDNLVLVGSTENRGKSDDVPSKEVVKDMKAYWEKLYAAGLISQRKFQRLTKGEQGGLTLEDKAHFIQRQLVETRQITKNVAGILDQRYNANSKEKKVQIITLKASLTSQFRSIFGLYKVREVNDYHHGQDAYLNCVVATTLLKVYPNLAPEFVYGEYPKFQTFKENKATAKAIIYTNLLRFFTEDEPRFTKDGEILWSNSYLKTIKKELNYHQMNIVKKVEVQKGGFSKESIKPKGPSNKLIPVKNGLDPQKYGGFDSPIVAYTVLFTHEKGKKPLIKQEILGITIMEKTRFEQNPILFLEEKGFLRPRVLMKLPKYTLYEFPEGRRRLLASAKEAQKGNQMVLPEHLLTLLYHAKQCLLPNQSESLAYVEQHQPEFQEILERVVDFAEVHTLAKSKVQQIVKLFEANQTADVKEIAASFIQLMQFNAMGAPSTFKFFQKDIERARYTSIKEIFDATIIYQSTTGLYETRRKVVD

SEQ ID NO: 407 - protein, 936 aa, Enterococcus faecalis
MKKDYVIGLDIGTNSVGWAVMTEDYQLVKKKMPIYGNTEKKKIKKNFWGVRLFEEGHTAEDRRLKRTARRRISRRRNRLRYLQAFFEEAMTDLDENFFARLQESFLVPEDKKWHRHPIFAKLEDEVAYHETYPTIYHLRKKLADSSEQADLRLIYLALAHIVKYRGHFLIEGKLSTENISVKEQFQQFMIIYNQTFVNGESRLVSAPLPESVLIEEELTEKASRTKKSEKVLQQFPQEKANGLFGQFLKLMVGNKADFKKVFGLEEEAKITYASESYEEDLEGILAKVGDEYSDVFLAAKNVYDAVELSTILADSDKKSHAKLSSSMIVRFTEHQEDLKKFKRFIRENCPDEYDNLFKNEQKDGYAGYIAHAGKVSQLKFYQYVKKIIQDIAGAEYFLEKIAQENFLRKQRTFDNGVIPHQIHLAELQAIIHRQAAYYPFLKENQEKIEQLVTFRIPYYVGPLSKGDASTFAWLKRQSEEPIRPWNLQETVDLDQSATAFIERMTNFDTYLPSEKVLPKHSLLYEKFMVFNELTKISYTDDRGIKANFSGKEKEKIFDYLFKTRRKVKKKDIIQFYRNEYNTEIVTLSGLEEDQFNASFSTYQDLLKCGLTRAELDHPDNAEKLEDIIKILTIFEDRQRIRTQLSTFKGQFSAEVLKKLERKHYTGWGRLSKKLINGIYDKESGKTILGYLIKDDGVSKHYNRNFMQLINDSQLSFKNAIQKAQSSEHEETLSETVNELAGSPAIKKGIYQSLKIVDELVAIMGYAPKRIVVEMARENQTTSTGKRRSIQRLKIVEKAMAEIGSNLLKEQPTTNEQLRDTRLFLYYMQNGKDMYTGDELSLHRLSHYDIDHIIPQSFMKDDSLDNLVLVGSTENRGKSDDVPSKEVVKDMKAYWEKLYAAGLISQRKFQRLTKGEQGGLTLEDKAHFIQRQLVETR

SEQ ID NO: 408 - protein, 1337 aa, Enterococcus faecalis
MKKDYVIGLDIGTNSVGWAVMTEDYQLVKKKMPIYGNTEKKKIKKNFWGVRLFEEGHTAEDRRLKRTARRRISRRRNRLRYLQAFFEEAMTDLDENFFARLQESFLVPEDKKWHRHPIFAKLEDEVAYHETYPTIYHLRKKLADSSEQADLRLIYLALAHIVKYRGHFLIEGKLSTENISVKEQFQQFMIIYNQTFVNGESRLVSAPLPESVLIEEELTEKASRTKKSEKVLQQFPQEKANGLFGQFLKLMVGNKADFKKVFGLEEEAKITYASESYEEDLEGILAKVGDEYSDVFLAAKNVYDAVELSTILADSDKKSHAKLSSSMIVRFTEHQEDLKKFKRFIRENCPDEYDNLFKNEQKDGYAGYIAHAGKVSQLKFYQYVKKIIQDIAGAEYFLEKIAQENFLRKQRTFDNGVIPHQIHLAELQAIIHRQAAYYPFLKENQEKIEQLVTFRIPYYVGPLSKGDASTFAWLKRQSEEPIRPWNLQETVDLDQSATAFIERMTNFDTYLPSEKVLPKHSLLYEKFMVFNELTKISYTDDRGIKANFSGKEKEKIFDYLFKTRRKVKKKDIIQFYRNEYNTEIVTLSGLEEDQFNASFSTYQDLLKCGLTRAELDHPDNAEKLEDIIKILTIFEDRQRIRTQLSTFKGQFSAEVLKKLERKHYTGWGRLSKKLINGIYDKESGKTILDYLVKDDGVSKHYNRNFMQLINDSQLSFKNAIQKAQSSEHEETLSETVNELAGSPAIKKGIYQSLKIVDELVAIMGYAPKRIVVEMARENQTTSTGKRRSIQRLKIVEKAMAEIGSNLLKEQPTTNEQLRDTRLFLYYMQNGKDMYTGDELSLHRLSHYDIDHIIPQSFMKDDSLDNLVLVGSTENRGKSDDVPSKEVVKDMKAYWEKLYAAGLISQRKFQRLTKGEQGGLTLEDKAHFIQRQLVETRQITKNVAGILNQRYNANSKEKKVQIITLKASLTSQFRSIFGLYKVREVNDYHHGQDAYLNCVVATTLLKVYPNLAPEFVYGEYPKFQTFKENKATAKAIIYTNLLRFFTEDEPRFTKDGEILWSNSYLKTIKKELNYHQMNIVKKVEVQKGGFSKESIKPKGPSNKLIPVKNGLDPQKYGGFDSPVVAYTVLFTHEKGKKPLIKQEILGITIMEKTRFEQNPILFLEEKGFLRPRVLMKLPKYTLYEFPEGRRRLLASAKEAQKGNQMVLPEHLLTLLYHAKQCLLPNQSESLAYVEQHQPEFQEILERVVDFAEVHTLAKSKVQQIVKLFEANQTADVKEIAASFIQLMQFNAMGAPSTFKFFQKDIERARYTSIKEIFDATIIYQSTTGLYETRRKVVD

SEQ ID NO: 409 - protein, 1337 aa, Enterococcus faecalis
MKKDYVIGLDIGTNSVGWAVMTEDYQLVKKKMPIYGNTEKKKIKKNFWGVRLFEEGHTAEDRRLKRTARRRISRRRNRLRYLQAFFEEAMTDLDENFFARLQESFLVPEDKKWHRHPIFAKLEDEVAYHETYPTIYHLRKKLADSSEQADLRLIYLALAHIVKYRGHFLIEGKLSTENISVKEQFQQFMIIYNQTFVNGESRLVSAPLPESVLIEEELTEKASRTKKSEKVLQQFPQEKANGLFGQFLKLMVGNKADFKKVFGLEEEAKITYASESYEEDLEGILAKVGDEYSDVFLAAKNVYDAVELSTILADSDKKSHAKLSSSMIVRFTEHQEDLKKFKRFIRENCPDEYDNLFKNEQKDGYAGYIAHAGKVSQLKFYQYVKKIIQDIAGAEYFLEKIAQENFLRKQRTFDNGVIPHQIHLAELQAIIHRQAAYYPFLKENQEKIEQLVTFRIPYYVGPLSKGDASTFAWLKRQSEEPIRPWNLQETVDLDQSATAFIERMTNFDTYLPSEKVLPKHSLLYEKFMVFNELTKISYTDDRGIKANFSGKEKEKIFDYLFKTRRKVKKKDIIQFYRNEYNTEIVTLSGLEEDQFNASFSTYQDLLKCGLTRAELDHPDNAEKLEDIIKILTIFEDRQRIRTQLSTFKGQFSAEVLKKLERKHYTGWGRLSKKLINGIYDKESGKTILGYLIKDDGVSKHYNRNFMQLINDSQLSFKNAIQKAQSSEHEETLSETVNELAGSPAIKKGIYQSLKIVDELVAIMGYAPKRIVVEMARENQTTSTGKRRSIQRLKIVEKAMAEIGSNLLKEQPTTNEQLRDTRLFLYYMQNGKDMYTGDELSLHRLSHYDIDHIIPQSFMKDDSLDNLVLVGSTENLGKSDDVPSKEVVKDMKAYWEKLYAAGLISQRKFQRLTKGEQGGLTLEDKAHFIQRQLVETRQITKNVAGILDQRYNANSKEKKVQIITLKASLTSQFRSIFGLYKVREVNDYHHGQDAYLNCVVATTLLKVYPNLAPEFVYGEYPKFQTFKENKATAKAIIYTNLLRFFTEDEPRFTKDGEILWSNSYLKTIKKELNYHQMNIVKKVEVQKGGFSKESIKPKGPSNKLIPVKNGLDPQKYGGFDSPIVAYTVLFTHEKGKKPLIKQEILGITIMEKTRFEQNPILFLEEKGFLRPRVLMKLPKYTLYEFPEGRRRLLASAKEAQKGNQMVLPEHLLTLLYHAKQCLLPNQSESLAYVEQHQPEFQEILERVVDFAEVHTLAKSKVQQIVKLFEANQTADVKEIAASFIQLMQFNAMGAPSTFKFFQKDIERARYTSIKEIFDATIIYQSTTGLYETRRKVVD

SEQ ID NO: 410 - protein, 1337 aa, Enterococcus faecalis
MKKDYVIGLDIGTNSVGWAVMTEDYQLVKKKMPIYGNTEKKKIKKNFWGVRLFEEGHTAEDRRLKRTARRRISRRRNRLRYLQAFFEEAMTDLDENFFARLQESFLVPEDKKWHRHPIFAKLEDEVAYHETYPTIYHLRKKLADSSEQADLRLIYLALAHIVKYRGHFLIEGKLSTENTSVKEQFQQFMVIYNQTFVNGESRLVSAPLPESVLIEEELTEKASRTKKSEKVLQQFPQEKANGLFGQFLKLMVGNKADFKKVFGLEEEAKITYASESYEEDLEGILAKVGDEYSDVFLAAKNVYDAVELSTILADSDKKSHAKLSSSMIVRFTEHQEDLKKFKRFIRENCPDEYDNLFKNEQKDGYAGYIAHAGKVSQLKFYQYVKKIIQDIAGAEYFLEKIAQENFLRKQRTFDNGVIPHQIHLAELQAIIHRQAAYYPFLKENQEKIEQLVTFRIPYYVGPLSKGDASTFAWLKRQSEEPIRPWNLQETVDLDQSATAFIERMTNFDTYLPSEKVLPKHSLLYEKFMVFNELTKISYTDDRGIKANFSGKEKEKIFDYLFKTRRKVKKKDIIQFYRNEYNTEIVTLSGLEEDQFNASFSTYQDLLKCGLTRAELDHPDNAEKLEDIIKILTIFEDRQRIRTQLSTFKGQFSAEVLKKLERKHYTGWGRLSKKLINGIYDKESGKTILDYLVKDDGVSKHYNRNFMQLINDSQLSFKNAIQKAQSSEHEETLSETVNELAGSPAIKKGIYQSLKIVDELVAIMGYAPKRIVVEMARENQTTSTGKRRSIQRLKIVEKAMAEIGSNLLKEQPTTNEQLRDTRLFLYYMQNGKDMYTGDELSLHRLSHYDIDHIIPQSFMKDDSLDNLVLVGSTENRGKSDDVPSKKVVKKMKAYWEKLYAAGLISQRKFQRLTKGEQGGLTLEDKAHFIQRQLVETRQITKNVAGILDQRYNAKSKEKKVQIITLKASLTSQFRSIFGLYKVREVNDYHHGQDAYLNCVVATTLLKVYPNLAPEFVYGEYPKFQAFKENKATAKTIIYTNLMRFFTEDEPRFTKDSEILWSNSYLKTIKKELNYHQMNIVKKVEVQKGGFSKESIKPKGPSNKLIPVKNGLDPQKYGGFDSPVVAYTVLFTHEKGKKPLIKQEILGITIMEKTRFEQNPILFLEEKGFLRPRVLMKLPKYTLYEFPEGRRRLLASAKEAQKGNQMVLPEHLLTLLYHAKQCLLPNQSESLAYVEQHQPEFQEILERVVDFAEVHTLAKSKVQQIVKLFEANQTADVKEIAASFIQLMQFNAMGAPSTFKFFQKDIERARYTSIKEIFDATIIYQSTTGLYETRRKVVD

SEQ ID NO: 411 - protein, 1150 aa, Enterococcus faecalis
MYSIGLDLGISSVGWSVIDERTGNVIDLGVRLFSAKNSEKNLERRTNRGGRRLIRRKTNRLKDAKKILAAVGFYEDKSLKNSCPYQLRVKGLTEPLSKGEIYKVTLHILKKRGISYLDEDDTEAAKESQDYKEQVRENAQLLTKYTPGQIQLQRLKENNRVKTGINAQGNYQLNVFKVSAYANELATILKTQQAFYPNELTDDWIALFVQPGIAEEAGLIYRKRPYYHGPGNEANNSPYGRWSDFKKTGQPATNIFDKLIGKDFQGELRASGLSLSAQQYNLLNDLTNLKIDGEIPLSPEQKEYILAELMTKEFTRFGVNDVVKLLGVKKERLSGWRLDKKGKPEIHTLKGYRNWRKIFAESGIDLAMLPTETIDCLAKILTLNTEREGIENTLAFELPELAESVKLLVLDRYKELSQSVSTQAWHRFSLKTLHLLIPELMNATSEQNTLLEQFQLKSDVRKRYSEYKKLPTKDVLTEIYNPTVNKTVSQAFKVIDALLVKYGKEQIRYITIEMPRDDNEEDEKKRIKELHAKNSQRKNDSQSYFMQKSGWSQEKFQTTIQKNRRFLAKLLYYYEQDGICAYTGLSISPELLVSDSTEIDHIIPISISLDDSINNKVLVLSKANQVKGQQTPYDAWMDGSFKKINGKFSNWDDYQKWVESRHFSHKKENNLLETRNIFDSEQVEKFLARNLNDTRYASRLVLNTLQSFFANQETKVRVVNGSFTHTLRKKWGADLDKTRETHHHHAVDATLCAVTPFVKVSRYHYAVKEETGEKVMREIDFETGEIVDEMSYREFKKSKKYERKTYQVKWPNFREQLKPVNLHPRIKFSHQVDRKANRKLSDATIYSVREKTEVKTLKSGKQKITTDEYTIGKIKDIYTVDGWEAFKKKQDKLLMKDLDEKTYERLLSIAETTPDFQEVEEKNGKVKRVKRSPFAVYCEENDIPAIRKYAKKNNGPLIRSLKYYDGKLNKHINITKDSQGRPVEKTKNGRKVTLQSLKPYRYDIYQDLETKAYYTVQLYYSDLRFVEGKYGITEKEYMKKVAEQTKGQVVRFCFSLQKNDGLEIEWKDSQRYDVRFYNFQSANSINFKGLEQEMMPAENQFKQKPYNNGAINLNIAKYGKEGKKLRKFNTDILGKKHYLYYEKEPKNIIK

SEQ ID NO: 412 - protein, 1150 aa, Enterococcus faecalis
MYSIGLDLGISSVGWSVIDERTGNVIDLGVRLFSAKNSEKNLERRTNRGGRRLIRRKTNRLKDAKKILAAVGFYEDKSLKNSCPYQLRVKGLTEPLSKGEIYKVTLHILKKRGISYLDEDDTEAAKESQDYKEQVRKNAQLLTKYTPGQIQLQRLKENNRVKTGINAQGNYQLNVFKVSAYANELATILKTQQAFYPNELTDDWIALFVQPGIAEEAGLIYRKRPYYHGPGNEANNSPYGRWSDFKKTGQPATNIFDRLIGKDFQGELRASGLSLSAQQYNLLNDLTNLKIDGEIPLSPEQKEYILAELMTKEFTRFGVNDVAKLLGVKKERLSGWRLDKKGKPEIHTLKGYRNWRKIFAESGIDLATLPTETIDCLAKVLTLNTEHEGIENTLAFELPELAESVKLLVLDRYKELSQSVSTQAWHRFSLKTLHLLIPELMNATSEQNTLLEQFQLKSDVRKRYSEYKKLPTKDVLTEIYNPTVNKTVSQAFKVIDALLVKYGKEQIRYITIEMPRDDNEEDEKKRIKELHAKNSQRKNDSQSYFMQKSGWSQEKFQTTIQKNRRFLAKLLYYYEQDGICAYTGLSISPELLVSDSTEIDHIIPISISLDDSINNKVLVLSKANQVKGQQTPYDAWMDGSFKKINGKFSNWDDYQKWVESRHFSHKKENNLLETRNIFDSEQVEKFLARNLNDTRYASRLVLNTLQSFFANHETKVRVVNGSFTHTLRKKWGADLDKTRETHHHHAVDATLCAVTPFVKVSRYHYAVKEETGEKVMREIDFETGEIVDEMSYQEFKKSKKYERKTYQVKWPNFREQLKPVNLHPRIKFSHQVDRKANRKLSDATIYSVREKTEVKTLKSGKQKITTDEYTIGKIKDIYTVDGWEAFKKKQDKLLMKDLDEKTYERLLSIAETTPDFQEVEEKNGKVKRVKRSPFAVYCEENDIPAIQKYAKKNNGPLIRSLKYYDGKLNKHINITKDSQGRPVEKTKNGRKVTLQSLKPYRYDIYQDLETKAYYTVQLYYSDLRFVEGKYGITEKEYMKKVAEQTKGQVVRFCFSLQKNDGLEIEWKDSQRYDVRFYNFQSANSINFKGLEQEMMPAENQFKQKPYNNGAINLNIAKYGKEGKKLRKFNTDILGKKHYLYYEKEPKNIIK

SEQ ID NO: 413 - protein, 1150 aa, Enterococcus faecalis
MYSIGLDLGISSVGWSVIDERTGNVIDLGVRLFSAKNSEKNLERRTNRGGRRLIRRKTNRLKDAKKILAAVGFYEDKSLKNSCPYQLRVKGLTEPLSKGEIYKVTLHILKKRGISYLDEDDTEAAKESQDYKEQVRKNAQLLTKYTPGQIQLQRLKENNRVKTGINVQGNYQLNVFKVSAYANELATILKTQQAFYPNELTDDWIALFVQPGIAEEAGLIYRKRPYYHGPGNEANNSPYGRWSDFQKTGEPATNIFDKLIGKDFQGELRASGLSLSAQQYNLLNDLTNLKIDGEVPLSSEQKEYILTELMTKEFTRFGVNDVVKLLGVKKERLSGWRLDKKGKPEIHTLKGYRNWRKIFAEAGIDLATLPTETIDCLAKVLTLNTEREGIENTLAFELPELSESVKLLVLDRYKELSQSISTQSWHRFSLKTLHLLIPELMNATSEQNTLLEQFQLKSDVRKRYSEYKKLPTKDVLAEIYNPTVNKTVSQAFKVIDALLVKYGKEQIRYITIEMPRDDNEEDEKKRIKELHAKNSQRKNDSQSYFMQKSGWSQEKFQTTIQKNRRFLAKLLYYYEQDGICAYTGLPISPELLVSDSTEIDHIIPISISLDDSINNKVLVLSKANQVKGQQTPYDAWMDGSFKKINGKFSNWDDYQKWVESRHFSHKKENNLLETRNIFDSEQVEKFLARNLNDTRYASRLVLNTLQSFFTNQETKVRVVNGSFTHTLRKKWGADLDKTRETHHHHAVDATLCAVTPFVKVSRYHYAVKEETGEKVMREIDFETGEIVNEMSYREFKKSKKYERKTYQVKWPNFREQLKPVNLHPRIKFSHQVDRKANRKLSDATIYSVREKTEVKTLKSGKQKITTDEYTIGKIKDIYTLDGWEAFKKKQDKLLMKDLDEKTYERLLSIAETTPDFQEVEEKNGKVKRVKRSPFAVYCEENDIPAIQKYAKKNNGPLIRSLKYYDGKLNKHINITKDSQGRPVEKTKNGRKVTLQSLKPYRYDIYQDLETKAYYTVQLYYSDLRFVEGKYGITEKEYMKKVAEQTKGQVVRFCFSLQKNDGLEIEWKDSQRYDVRFYNFQSANSINFKGLEQEIMPAENQFKQKPYNNGAINLNIAKYGKEGKKLRKFNTDILGKKHYLFYEKEPKNIIK

SEQ ID NO: 414 - protein, 1150 aa, Enterococcus faecalis; identical to SEQ ID NO: 183

SEQ ID NO: 415 - protein, 1150 aa, Enterococcus faecalis; identical to SEQ ID NO: 184

SEQ ID NO: 416 - protein, 1340 aa, Enterococcus faecium
MKKEYTIGLDIGTNSVGWSVLTDDYRLVSKKMKVAGNTEKSSTKKNFWGVRLFDEGQTAEARRSKRTARRRLARRRQRILELQKIFAPEILKIDEHFFARLNESFLVLDEKKQSRHPVFATIKQEKSYHQTYPTIYHLRQALADSSEKADIRLVYLAMAHLLKYRGHFLIEGELNTENSSVTETFRQFLSTYNQQFSEADDKQTEKLDEAVDCSFVFTEKMSKTKKAETLLKYFPHEKSNGYLSQFIKLMVGNQGNFKNVFGLEEEAKLQFSKETYEEDLEELLEKIGDDYIDLFVQAKNVYDAVLLSEILSDSTKNTRAKLSAGMIRRYDAHKEDLVLLKRFVKENLPKKYRAFFGDNSVNGYAGYIEGHATQEDFYKFVKKELTGIRGSEVFLTKIEQENFLRKQRTFDNGVIPHQIHLTELRAIIANQKKHYPFLKEEQEKLESLLTFKIPYYVGPLAKKQENSPFAWLIRKSEEKIKPWNLPEIVDMEGSAVRFIERMNNTDMYIPHNKVLPKNSLLYQKFSIYNELTKVRYQDERGQMNYFSSIEKKEIFHELFEKNRKVTKKDLQEFLYLKYDIKHAELSGIEKAFNASYTTYHDFLTMSENKREMKQWLEDPELASMFEEIIKTLTVFEDREMIKTRLSHHEATLGKHIIKKLTKKHYTGWGRLSKELIQGIRDKQSNKTILDYLINDDDFPHHRNRNFMQLINDDSLSFKKEIKKAQMITDTENLEEIVKELTGSPAIKKGILQSLKIVDEIVGIMGYEPANIVVEMARENQTTGRGLKSSRPRLKALEESLKDFGSQLLKEYPTDNSSLQKDRLYLYYLQNGRDMYTGAPLDIHRLSDYDIDHIIPRSFTTDNSIDNKVLVSSKENRLKKDDVPSEKVVKKMRSFWYDLYSSKLISKRKLDNLTKIKLTEEDKAGFIKRQLVETRQITKHVAGILHHRFNKAEDTNEPIRKVRIITLKSALVSQFRNRFGIYKVREINEYHHAHDAYLNGVVALALLKKYPQLAPEFVYGEYLKFNAHKANKATVKKEFYSNIMKFFESDTPVCDENGEIFWDKSKSIAQVKKVINHHHMNIVKKTEIQKGGFSKETVEPKKDSSKLLPRKNNWDPAKYGGLGSPNVAYTVAFTYEKGKARKRTNALEGITIMEREAFEQSPVLFLKNKGYEQAEIEMKLPKYALFELENGRKRMVASNKEAQKANSFLLPEHLVTLLYHAKQYDEISHKESFDYVNEHHKEFSEVFARVLEFAGKYTLAEKNIEKLEKIYKENQTDDLAKLASSFVNLMQFNAMGAPADFKFFDVTIPRKRYTSLTEIWQSTIIHQSITGLYETRIRMGK

SEQ ID NO: 417 - protein, 1339 aa, Enterococcus faecium
MKKEYTIGLDIGTNSVGWSVLTDDYRLVSKKMKVAGNTEKSSTKKNFWGVRLFDEGQTAEARRSKRTARRRLARRRQRILELQKIFAPEILKIDEHFFARLNESFLVLDEKKQSRHPVFATIKQEKSYHQTYPTIYHLRQALADSSEKADIRLVYLAMAHLLKYRGHFLIEGELNTENSSVTETFRQFLSTYNQQFSEADDKQTEKLDEAVDCSFVFTEKMSKTKKAETLLKYFPHEKSNGYLSQFIKLMVGNQGNFKNVFGLEEAKLQFSKETYEEDLEELLEKIGDDYIDLFVQAKNVYDAVLLSEILSDSTKNTRAKLSAGMIRRYDAHKEDLVLLKRFVKENLPKKYRAFFGDNSVNGYAGYIEGHATQEDFYKFVKKELTGIRGSEVFLTKIEQENFLRKQRTFDNGVIPHQIHLTELRAIIANQKKHYPFLKEEQEKLESLLTFKIPYYVGPLAKKQENSPFAWLIRKSEEKIKPWNLPEIVDMEGSAVRFIERMINTDMYMPHNKVLPKNSLLYQKFSIYNELTKVRYQDERGQMNYFSSIEKKEIFHELFEKNRKVTKKDLQEFLYLKYDIKHAELSGIEKAFNASYTTYHDFLTMSENKREMKQWLEDPELASMFEEIIKTLTVFEDREMIKTRLSHHEATLGKHIIKKLTKKHYTGWGRLSKELIQGIRDKQSNKTILDYLINDDDFPHHRNRNFMQLINDDSLSFKKEIKKAQMITDTENLEEIVKELTGSPAIKKGILQSLKIVDEIVGIMGYEPANIVVEMARENQTTGRGLKSSRPRLKALEESLKDFGSQLLKEYPTDNSSLQKDRLYLYYLQNGRDMYTGAPLDIHRLSDYDIDHIIPRSFTTDNSIDNKVLVSSKENRLKKDDVPSEKVVKKMRSFWYDLYSSKLISKRKLDNLTKIKLTEEDKAGFIKRQLVETRQITKHVAGILHHRFNKAEDTNEPIRKVRIITLKSALVSQFRNRFGIYKVREINEYHHAHDAYLNGVVALALLKKYPQLAPEFVYGEYLKFNAHKANKATVKKEFYSNIMKFFESDTPVCDENGEIFWDKSKSIAQVKKVINHHHMNIVKKTEIQKGGFSKETVEPKKDSSKLLPRKNNWDPAKYGGLGSPNVAYTVAFTYEKGKARKRTNALEGITIMEREAFEQSPVLFLKNKGYEQAEIEMKLPKYALFELENGRKRMVASNKEAQKANSFLLPEHLVTLLYHAKQYDEISHKESFDYVNEHHKEFSEVFARVLEFAGKYTLAEKNIEKLEKIYKENQTDDLAKLASSFVNLMQFNAMGAPADFKFFDVTIPRKRYTSLTEIWQSTIIHQSITGLYETRIRMGK

SEQ ID NO: 418 - protein, 1340 aa, Enterococcus faecium
MKKEYTIGLDIGTNSVGWSVLTDDYRLVSKKMKVAGNTEKSSTKKNFWGVRLFDEGQTAEARRSKRTARRRLARRRQRILELQKIFAPEILKIDEHFFARLNESFLVLDEKKQSRHPVFATIKQEKSYHQTYPTIYHLRQALADSSEKADIRLVYLAMAHLLKYRGHFLIEGELNTENSSVTETFRQFLSTYNQQFSEADDKQTEKLDEAVDCSFVFTEKMSKTKKAETLLKYFPHEKSNGYLSQFIKLMVGNQGNFKNVFGLEEEAKLQFSKETYEEDLEELLEKIGDDYIDLFVQAKNVYDAVLLSEILSDSTKNTRAKLSAGMIRRYDAHKEDLVLLKRFVKENLPKKYRAFFGDNSVNGYAGYIEGHATQEDFYKFVKKELTGIRGSEVFLTKIEQENFLRKQRTFDNGVIPHQIHLTELRAIIANQKKHYPFLKEEQEKLESLLTFKIPYYVGPLAKKQENSPFAWLIRKSEEKIKPWNLPEIVDMEGSAVRFIERMINTDMYIPHNKVLPKNSLLYQKFSIYNELTKVRYQDERGQMNYFSSIEKKEIFHELFEKNRKVTKKDLQEFLYLKYDIKHAELSGIEKAFNASYTTYHDFLTMSENKREMKQWLEDPELASMFEEIIKTLTVFEDREMIKTRLSHHEATLGKHIIKKLTKKHYTGWGRLSKELIQGIRDKQSNKTILDYLINDDDFPHHRNRNFMQLINDDSLSFKKEIKKAQMITDTENLEEIVKELTGSPAIKKGILQSLKIVDEIVGIMGYEPANIVVEMARENQTTGRGLKSSRPRLKALEESLKDFGSQLLKEYPTDNSSLQKDRLYLYYLQNGRDMYTGAPLDIHRLSDYDIDHIIPRSFTTDNSIDNKVLVSSKENRLKKDDVPSEKVVKKMRSFWYDLYSSKLISKRKLDNLTKIKLTEEDKAGFIKRQLVETRQITKHVAGILHHRFNKAEDTNEPIRKVRIITLKSALVSQFRNRFGIYKVREINEYHHAHDAYLNGVVALALLKKYPQLAPEFVYGEYLKFNAHKANKATVKKEFYSNIMKFFESDTPVCDENGEIFWDKSKSIAQVKKVINHHHMNIVKKTEIQKGGFSKETVEPKKDSSKLLPRKNNWDPAKYGGLGSPNVAYTVAFTYEKGKARKRTNALEGITIMEREAFEQSPVLFLKNKGYEQAEIEMKLPKYALFELENGRKRMVASNKEAQKANSFLLPEHLVTLLYHAKQYDEISHKESFDYVNEHHKEFSEVFARVLEFAGKYTLAEKNIEKLEKIYKENQTDDLAKLASSFVNLMQFNAMGAPADFKFFDVTIPRKRYTSLTEIWQSTIIHQSITGLYETRIRMGK

SEQ ID NO: 419 - protein, 1340 aa, Enterococcus faecium
MKKEYTIGLDIGTNSVGWSVLTDDYRLVSKKMKVAGNTEKSSTKKNFWGVRLFDEGQTAEARRSKRTARRRLARRRQRILELQKIFAPEILKIDEHFFARLNESFLVLDEKKQSRHPVFATIKQEKSYHQTYPTIYHLRQALADSSEKADIRLVYLAMAHLLKYRGHFLIEGELNTENSSVTETFRQFLSTYNQQFSEADDKQTEKLDEAVDCSFVFTEKMSKTKKAETLLKYFPHEKSNGYLSQFIKLMVGNQGNFKNVFGLEEEAKLQFSKETYEEDLEELLEKIGDDYIDLFVQAKNVYDAVLLSEILSDSTKNTRAKLSAGMIRRYDAHKEDLVLLKRFVKENLPKKYRAFFGDNSVNGYAGYIEGHATQEDFYKFVKKELTGIRGSEVFLTKIEQENFLRKQRTFDNGVIPHQIHLTELRAIIANQKKHYPFLKEEQEKLESLLTFKIPYYVGPLAKKQENSPFAWLIRKSEEKIKPWNLPEIVDMEGSAVRFIERMINTDMYMPHNKVLPKNSLLYQKFSIYNELTKVRYQDERGQMNYFSSIEKKEIFHELFEKNRKVTKKDLQEFLYLKYDIKHAELSGIEKAFNASYTTYHDFLTMSENKREMKQWLEDPELASMFEEIIKTLTVFEDREMIKTRLSHHEATLGKHIIKKLTKKHYTGWGRLSKELIQGIRDKQSNKTILDYLINDDDFPHHRNRNFMQLINDDSLSFKKEIKKAQMITDTENLEEIVKELTGSPAIKKGILQSLKIVDEIVGIMGYEPANIVVEMARENQTTGRGLKSSRPRLKALEESLKDFGSQLLKEYPTDNSSLQKDRLYLYYLQNGRDMYTGAPLDIHRLSDYDIDHIIPRSFTTDNSIDNKVLVSSKENRLKKDDVPSEKVVKKMRSFWYDLYSSKLISKRKLDNLTKIKLTEEDKAGFIKRQLVETRQITKHVAGILHHRFNKAEDTNEPIRKVRIITLKSALVSQFRNRFGIYKVREINEYHHAHDAYLNGVVALALLKKYPQLAPEFVYGEYLKFNAHKANKATVKKEFYSNIMKFFESDTPVCDENGEIFWDKSKSIAQVKKVINHHHMNIVKKTEIQKGGFSKETVEPKKDSSKLLPRKNNWDPAKYGGLGSPNVAYTVAFTYEKGKARKRTNALEGITIMEREAFEQSPVLFLKNKGYEQAEIEMKLPKYALFELENGRKRMVASNKEAQKANSFLLPEHLVTLLYHAKQYDEISHKESFDYVNEHHKEFSEVFARVLEFAGKYTLAEKNIEKLEKIYKENQTDDLAKLASSFVNLMQFNAMGAPADFKFFDVTIPRKRYTSLTEIWQSTIIHQSITGLYETRIRMGK

SEQ ID NO: 420 - protein, 1339 aa, Enterococcus faecium
MKKEYTIGLDIGTNSVGWSVLTDDYRLVSKKMKVAGNTEKSSTKKNFWGVRLFDEGQTAEARRSKRTARRRLARRRQRILELQKIFAPEILKIDEHFFARLNESFLVLDEKKQSRHPVFATIKQEKSYHQTYPTIYHLRQALADSSEKADIRLVYLAMAHLLKYRGHFLIEGELNTENSSVTETFRQFLSTYNQQFSEADDKQTEKLDEAVDCSFVFTEKMSKTKKAETLLKYFPHEKSNGYLSQFIKLMVGNQGNFKNVFGLEEAKLQFSKETYEEDLEELLEKIGDDYIDLFVQAKNVYDAVLLSEILSDSTKNTRAKLSAGMIRRYDAHKEDLVLLKRFVKENLPKKYRAFFGDNSVNGYAGYIEGHATQEDFYKFVKKELTGIRGSEVFLTKIEQENFLRKQRTFDNGVIPHQIHLTELRAIIANQKKHYPFLKEEQEKLESLLTFKIPYYVGPLAKKQENSPFAWLIRKSEEKIKPWNLPEIVDMEGSAVRFIERMINTDMYIPHNKVLPKNSLLYQKFSIYNELTKVRYQDERGQMNYFSSIEKKEIFHELFEKNRKVTKKDLQEFLYLKYDIKHAELSGIEKAFNASYTTYHDFLTMSENKREMKQWLEDPELASMFEEIIKTLTVFEDREMIKTRLSHHEATLGKHIIKKLTKKHYTGWGRLSKELIQGIRDKQSNKTILDYLINDDDFPHHRNRNFMQLINDDSLSFKKEIKKAQMITDTENLEEIVKELTGSPAIKKGILQSLKIVDEIVGIMGYEPANIVVEMARENQTTGRGLKSSRPRLKALEESLKDFGSQLLKEYPTDNSSLQKDRLYLYYLQNGRDMYTGAPLDIHRLSDYDIDHIIPRSFTTDNSIDNKVLVSSKENRLKKDDVPSEKVVKKMRSFWYDLYSSKLISKRKLDNLTKIKLTEEDKAGFIKRQLVETRQITKHVAGILHHRFNKAEDTNEPIRKVRIITLKSALVSQFRNRFGIYKVREINEYHHAHDAYLNGVVALALLKKYPQLAPEFVYGEYLKFNAHKANKATVKKEFYSNIMKFFESDTPVCDENGEIFWDKSKSIAQVKKVINHHHMNIVKKTEIQKGGFSEETVEPKKDSSKLLPRKNNWDPAKYGGLGSPNVAYTVAFTYEKGKARKRTNALEGITIMEREAFEQSPVLFLKNKGYEQAEIEMKLPKYALFELENGRKRMVASNKEAQKANSFLLPEHLVTLLYHAKQYDEISHKESFDYVNEHHKEFSEVFARVLEFAGKYTLAEKNIEKLEKIYKENQTDDLAKLASSFVNLMQFNAMGAPADFKFFDVTIPRKRYTSLTEIWQSTIIHQSITGLYETRIRMGK

SEQ ID NO: 421 - protein, 1340 aa, Enterococcus faecium
MKKEYTIGLDIGTNSVGWSVLTDDYRLVSKKMKVAGNTEKSSTKKNFWGVRLFDEGQTAEARRSKRTARRRLARRRQRILELQKIFAPEILKIDEHFFARLNESFLVLDEKKQSRHPVFATIKQEKSYHQTYPTIYHLRQALADSSEKADIRLVYLAMAHLLKYRGHFLIEGELNTENSSVTETFRQFLSTYNQQFSEADDKQTEKLDEAVDCSFVFTEKMSKTKKAETLLKYFPHEKSNGYLSQFIKLMVGNQGNFKNVFGLEEEAKLQFSKETYEEDLEELLEKIGDDYIDLFVQAKNVYDAVLLSEILSDSTKNTRAKLSAGMIRRYDAHKEDLVLLKRFVKENLPKKYRAFFGDNSVNGYAGYIEGHATQEDFYKFVKKELTGIRGSEVFLTKIEQENFLRKQRTFDNGVIPHQIHLTELRAIIANQKKHYPFLKEEQEKLESLLTFKIPYYVGPLAKKQENSPFAWLIRKSEEKIKPWNLPEIVDMEGSAVRFIERMINTDMYIPHNKVLPKNSLLYQKFSIYNELTKVRYQDERGQMNYFSSIEKKEIFHELFEKNRKVTKKDLQEFLYLKYDIKHAELSGIEKAFNASYTTYHDFLTMSENKREMKQWLEDPELASMFEEIIKTLTVFEDREMIKTRLSHHEATLGKHIIKKLTKKHYTGWGRLSKELIQGIRDKQSNKTILDYLINDDDFPHHRNRNCMQLINDDSLSFKKEIKKAQMITDTENLEEIVKELTGSPAIKKGILQSLKIVDEIVGIMGYEPANIVVEMARENQTTGRGLKSSRPRLKALEESLKDFGSQLLKEYPTDNSSLQKDRLYLYYLQNGRDMYTGAPLDIHRLSDYDIDHIIPRSFTTDNSIDNKVLVSSKENRLKKDDVPSEKVVKKMRSFWYDLYSSKLISKRKLDNLTKIKLTEEDKAGFIKRQLVETRQITKHVAGILHHRFNKAEDTNEPIRKVRIITLKSALVSQFRNRFGIYKVREINEYHHAHDAYLNGVVALALLKKYPQLAPEFVYGEYLKFNAHKANKATVKKEFYSNIMKFFESDTPVCDENGEIFWDKSKSIAQVKKVINHHHMNIVKKTEIQKGGFSKETVEPKKDSSKLLPRKNNWDPTKYGGLGSPNVAYTVAFTYEKGKARKRTNALEGITIMEREAFEQSPVLFLKNKGYEQAEIEMKLPKYALFELENGRKRMVASNKEAQKANSFLLPEHLVTLLYHAKQYDEISHKESFDYVNEHHKEFSEVFARVLEFAGKYTLAEKNIEKLEKIYKENQTDDLAKLASSFVNLMQFNAMGAPADFKFFDVTIPRKRYTSLTEIWQSTIIHQSITGLYETRIRMGK

SEQ ID NO: 422 - protein, 892 aa, Enterococcus faecium
MTFKIPYYVGPLAKKQENSPFAWLIRKSEEKIKPWNLPEIVDMEGSAVRFIERMINTDMYMPHNKVLPKNSLLYQKFSIYNELTKVRYQDERGQMNYFSSIEKKEIFHELFEKNRKVTKKDLQEFLYLKYDIKHAELSGIEKAFNASYTTYHDFLTMSENKREMEQWLEDPELASMFEEIIKTLTVFEDREMIKTRLSHHKATLGKHIIKKLTKKHYTGWGRLSKELIQGIRDKQSNKTILDYLINDDDFPHHRNRNFMQLINDDSLSFKKEIKKAQMITDTENLEEIVKELTGSPAIKKGILQSLKIVDEIVGIMGYEPANIVVEMARENQTTGRGLKSSRPRLKALEESLKDFGSQLLKEYPTDNSSLQKDRLYLYYLQNGRDMYTGAPLDIHRLSDYDIDHIIPRSFTTDNSIDNKVLVSSKENRLKKDDVPSEKVVKKMRSFWYDLYSSKLISKRKLDNLTKIKLTEEDKAGFIKRQLVETRQITKHVAGILHHRFNKAEDTNEPIRKVRIITLKSALVSQFRNRFGIYKVREINEYHHAHDAYLNGVIALALLKKYPQLAPEFVYGEYLKFNAHKANKATVKKEFYSNIMKFFESDTPVCDENGEIFWDKSKSIAQVKKVINHHHMNIVKKTEIQKGGFSKETVEPKKDSSKLLPRKNNWDPAKYGGLGSPNVAYTVAFTYEKGKARKRTNALEGITIMEREAFEQSPVLFLKNKGYEQAEIEMKLPKYALFELENGRKRMVASNKEAQKANSFLLPEHLVTLLYHAKQYDEISHKESFDYVNEHHKEFSEVFARVLEFAGKYTLAEKNIEKLEKIYKENQTDDLAKLASSFVNLMQFNAMGAPADFKFFDVTIPRKRYTSLTEIWQSTIIHQSITGLYETRIRMGK

SEQ ID NO: 423 - protein, 1336 aa, Enterococcus hirae
MTKDYTIGLDIGTNSVGWAVLTDDYQLMKRKMSVHGNTEKKKIKKNFWGARLFDEGQTAEFRRTKRTNRRRLARRKYRLSKLQDLFAEELCKQDDCFFVRLEESFLVPEEKQYKPASIFPTLEEEKEYYQKYPTIYHLRQKLVDSTEKEDLRLVYLALAHLLKYRGHFLFEGDLDTENTSIEESFRVFLEQYSKQSDQPLIVHQPVLTILTDKLSKTKKVEEILKYYPTEKINSFFAQCLKLIVGNQANFKRIFDLEAEVKLQFSKETYEEDLESLLEKIGDEYLDIFLQAKKVHDAILLSEIISSTVKHTKAKLSSGMVERYERHKADLAKFKQFVKENVPQKATVFFKDTTKNGYAGYIKGKTTQEEFYKFVKKELSGVVGSEPFLEKIDQETFLLKQRTYTNGVIPHQVHLIELKAIIDQQKQHYPFLEEAGPKIIALFKFRIPYYVGPLAKEQEASSFAWIERKTAEKINPWNFSEVVDIEKSAMRFIQRMTKQDTYLPTEKVLPKNSLLYQKYMIFNELTKVSYKDERGVKQYFSGDEKQQIFKQLFQKERGKITVKKLQNFLYTHYHIENAQIFGIEKAFNASYSTYHDFMKLAKTNQKAMQEWLEQPEMEPIFEDIVKILTIFEDRQMIKHQLSKYQEVFGEKLLKEFARKHYTGWGRFSAKLIHGIRDRKTNKTILDYLINDDDVPANRNRNLMQLINDEHLSFKEEIAKATVFSKHKSLVDVIQDLPGSPAIKKGIWQSLKIVEELIAIIGYKPKNIVIEMARENQKTHRTSPRLKALENGLKQIGSTLLKEQPTDNKALQKERLYLYYLQNGRDMYTGEPLEIENLHQYEVDHIIPRSFIVDNSIDNKVLVASKQNQKKRDDVPKKQIVNEQRIFWNQLKEAKLISPKKYAYLTKIELTPEDKARFIQRQLVETRQITKHVANILHQSFNQEEEGTDCDGVQIITLKATLTSQFRQTFGLYKVREINPHHHAHDAYLNGFIANVLLKRYPKLAPEFVYGKYVKYSLARENKATAKKEFYSNILKFLESDEPFCDENGEIYWEKSHHLPRIKKVLSSHQVNVVKKVEQQKGGFYKETVNSKEKPDKLIERKNNWDVTKYGGFGSPVIAYAIAFVYAKGKTQKKTRAIEGITIMEQAAFEKDPTTFLKEKGFPQVTEFIKLPKYTLFEFDNGRRRFLASHKESQKGNPFILSDQLVTLLYHAQHYDKITYQESFDYVNTHLSDFSAILTEVLAFAEKYTLADKNIERIQELYEENKYGETSMIAQSFLQLLQFNAIGAPADFKFFGVTIPRKRYTSLTEIWDATIIYQSVTGLYETRIRMGDLWAGEQ

SEQ ID NO: 424 - protein, 116 aa, Unknown
  Enterococcus sp.
MYSIGLDLGISSVGWSVIDERTGNVIDLGVRLFSAKNSEKNLERRTNRGGRRLIRRKTNRLKDAKKILAAVGFYEDKSLKNSCPYQLRVKGLTELLSKGEIYKVTLHILKNVELVT

SEQ ID NO: 425 - protein, 1391 aa, Unknown
  Eubacterium sp.
MENKQYYIGLDVGTNSVGWAVTDTSYNLLRAKGKDMWGARLFDEAKTAVERRTKRTSRRRSEREKARKAMLKELFADEINKVDPNFFIRLEESKFFLDDRSENNRQRYTLFNDAKFTDKDYYEKYKTIFHLRSALINSDEKFDVRLVFLAILNLFSHRGHFLNASLKGDGEIQGVDIFYNDLYEVCEEFEIDLPQISNIDNFEKILSQKGKSRTKILEELSEELSISKKEKIKYSLLKLICGMKIKVVDIYADEDIQEDDKKKDLGFRESDYEKSSLEVKEIIGDDHFELIERAKAVHDIGLLANIIGNSKYLCEARVEAYDNHHKDLQKIKELLKKYDIKAYTDMFRKMTDKNYSAYVGSVNSNIAKERRSVDNRKIEDLYEYIKKIALKNISDDNEDKIEILKKIETGEFLKKQLTASNGVIPNQLQSRELRAILKKAENYLPFLKEKGEKNLTVSEMIIQLFEFQIPYYVGPLDKNPKKDKNANSWAVIPSGGRILPWNFEDKVDVKGSRKEFIEKMVRKCTYLSEEHTLPKQSLLYEKFMVLNEINNIKIDGEKISVEAKQKIYNDLFMKGKKVSQKAIKQELISLNIMSKDSVLSGIDTVCNAYLSSIAKFRGVFDENVNNQSTIDMIEDIIFLKTVYSDEKRFVKEEIVEKYGDEIDKDKIKRILGFKFSNWGNISKSFLELEGADVGTGEIRSIIQSLWETNFNLMELLSSRFTYMDELEKRVKKLEKPLSEWTIEDLDDMYLSSPVKRMIWQSMKIVDEIQTVIGYAPKRIFVEMTRSEGEKVRTKSRKDRLKELYSAIKEDSKQWVKELDAKDESYFRSKKMYLYYLQKGRCMYSGEVIELDKLMDDNLYDIDHIYPRSFVKDDSLDNLVLVKKEINNRKQNDPITPQIQASCQGFWKVLHEQGFISNEKYSRLTRKTQEFSDEEKLSFINRQIVETGQATKCMAQILQKSMGEDVDVVFSKARLVSEFRHKFELFKSRLINDFHHANDAYLNIVVGNSYFVKFTRNPANFIKDARKNPDNPAYKYHMDRFFERDVKSKSEVAWIGQSEGNAGTIAIVKKTMSKNSPLITKKVEEGHGSITKETIVGVKEIKFGRNKVEKADKTPKKANLQAYRPIKTSDERLCNILRYGGRTSISISGYCLVEYVKKRKTIRSLEAIPVYLGRKDSLSEEKLLNYFRYNLNDGGKDSVSDIRLCLPFISTNSLVKIDGYLYYLGGKNDDRIQLYNAYQLKMKKEEVEYIRKIEKAVSMSKFDEIDREKNPVLTEEKNIELYNKIQDKFENTVFSKRMSLVKYNKKDLSFGDFLKNKKSKFEEIDLEKQCKVLYNIIFNLSNLKEVDLSDIGGSKSTGKCRCKKNITNYKEFKLIQQSITGLYSCEKDLMTI

SEQ ID NO: 426 - protein, 1391 aa, Unknown
  Eubacterium yurii
MENKQYYIGLDVGTNSVGWAVTDTSYNLLRAKGKDMWGARLFEKANTAAERRTKRTSRRRSEREKARKAMLKELFADEINRVDPSFFIRLEESKFFLDDRSENNRQRYTLFNDATFTDKDYYEKYKTIFHLRSALINSDEKFDVRLVFLAILNLFSHRGHFLNASLKGDGDIQGMDVFYNDLVESCEYFEIELPRITNIDNFEKILSQKGKSRTKILEELSEELSISKKDKSKYNLIKLISGLEASVVELYNIEDIQDENKKIKIGFRESDYEESSLKVKEIIGDEYFDLVERAKSVHDMGLLSNIIGNSKYLCEARVEAYENHHKDLLKIKELLKKYDKKAYNDMFRKMTDKNYSAYVGSVNSNIAKERRSVDKRKIEDLYKYIEDTALKNIPDDNKDKIEILEKIKLGEFLKKQLTASNGVIPNQLQSRELRAILKKAENYLPFLKEKGEKNLTVSEMIIQLFEFQIPYYVGPLDKNPKKDNKANSWAKIKQGGRILPWNFEDKVDVKGSRKEFIEKMVRKCTYISDEHTLPKQSLLYEKFMVLNEINNIKIDGEKISVEAKQKIYNDLFVKGKKVSQKDIKKELISLNIMDKDSVLSGTDTVCNAYLSSIGKFTGVFKEEINKQSIVDMIEDIIFLKTVYGDEKRFVKEEIVEKYGDEIDKDKIKRILGFKFSNWGNLSKSFLELEGADVGTGEVRSIIQSLWETNFNLMELLSSRFTYMDELEKRVKKLEKPLSEWTIEDLDDMYLSSPVKRMIWQSMKIVDEIQTVIGYAPKRIFVEMTRSEGEKVRTKSRKDRLKELYNGIKEDSKQWVKELDSKDESYFRSKKMYLYYLQKGRCMYSGEVIELDKLMDDNLYDIDHIYPRSFVKDDSLDNLVLVKKEINNRKQNDPITPQIQASCQGFWKILHDQGFMSNEKYSRLTRKTQEFSDEEKLSFINRQIVETGQATKCMAQILQKSMGEDVDVVFSKARLVSEFRHKFELFKSRLINDFHHANDAYLNIVVGNSYFVKFTRNPANFIKDARKNPDNPVYKYHMDRFFERDVKSKSEVAWIGQSEGNSGTIVIVKKTMAKNSPLITKKVEEGHGSITKETIVGVKEIKFGRNKVEKADKTPKKPNLQAYRPIKTSDERLCNILRYGGRTSISISGYCLVEYVKKRKTIRSLEAIPVYLGRKDSLSEEKLLNYFRYNLNDGGKDSVSDIRLCLPFISTNSLVKIDGYLYYLGGKNDDRIQLYNAYQLKMKKEEVEYIRKIEKAVSMSKFDEIDREKNPVLTEEKNIELYNKIQDKFENTVFSKRMSLVKYNKKDLSFGDFLKNKKSKFEEIDLEKQCKVLYNIIFNLSNLKEVDLSDIGGSKSTGKCRCKKNITNYKEFKLIQQSITGLYSCEKDLMTI

SEQ ID NO: 427 - protein, 1142 aa, Facklamia hominis
MYSVGLDIGIASCGYSIINDVNGNIVELGTLLFKSRNSDNNEERRTNRGSRRLINRRRTRLDDGKKLLAEKGFKQDSKLKHVCPYELRVKGLHEKLTQGEIYKVVLHILKKRGISYLDESDENSSGIDGASYKDQVNLNLNLQKELTPGQIQLKRLKENGRIKSGVTFENGYQLNVFSVSAYANELNKILTKQSEYYSEIDQIWIDRFTKNGYRKEAGLVYRKRPYYDGPGNEKNNSIYGRWANFKEDGHPKENIFDQLIGLDSVDSTQVRASASTLTAQKYNLLNDLNNLTIIEDDRKFTTDEKVSIINYLMTQDITRFGPKELAKFYQLEVDQIRGWRIDNKGNPEIHSLKVYRDWKKIFNTSSIDLTSIQTWVVDELANVITLNTEIPSTLATLKIKIPDIDQQILNFVENNFYELKKKTSKNSWHSFSLKTLNILIPELLNTSEEQNTILERLNLKFDLKNKYAEKNQIPVKELLEQIYNPTVTKSVHQSIKLFNEIIEKYGKNNISYVTIEMPRDKNDQDQKDTIKRINKLNSERKNDSEKYFLERSGWDTIRFESALKKPRFAEKLLFYYEQKGKCAYSGQDILAESLLNESCEVDHIIPLSISFDDSIHNKVLVTASSNQEKGQRTPYMAFIDGAKLGQSWDDFVAWVNSCGFHRKKVQNLLYEENIFNPDVQRGFVSRNLNDTRYASRIVLNAIQSFFYKQKDLTKVKVVNGSFTHTLRKKWGSSLDKNRDTYHHHAVDATLCAVTPFINIVKYEFFEEDGIKYMVDLTTGEKVAYSDYKKMKFYDKRAYVPIWDGFIKQLTPANLYPKIKFSHQVDSKWNRKISDATIYSTRKIVETKINKKGVAKETVKDIVIDKIKDIYTPEGWRKFKEKQDKLLMKNFDEKTYNKLIKIAKEYPEKKEVQTSNGKVSLVEVSPFKMYCEEQNVPAIRKYSKKGNGPYIRSLKFYDKELGKHINITKDSYGNDIERTIRNKKIILKNQNSWRTDVYYNSVNNCYELLGIKYCHLKFYRGKYGIPKSIYDELKKEDEISSESVFKFSLYRHDRVRFEKDGEYIEALFGSKNESNKNYLELSPIDKNKWLSKENVKFFGEVAASGRFIKGLKPGIKVIKQSTDYMGHVYAIHQEKLKFVLSDA

SEQ ID NO: 428 - protein, 1347 aa, Finegoldia magna
MKSEKKYYIGLDVGTNSVGWAVTDEFYNILRAKGKDLWGVRLFEKAKTAADTRTFRSGRRRNDRKGMRLQILREIFEDEIKKVDKDFYDRLDESKFWAEDKKVSGKYSLFNDKNFSDKQYFEKFPTIFHLRKYLMEEHGKVDIRYYFLAINQMMKRRGHFLIDGQISHVTDDKPLKEQLILLINDLLKIELEEELMDSIFEILADVNEKRTDKKNNLKELIKGQDFNKQEGNILNSIFESIVTGKAKIKNIISDEDILEKIKEDNKEDFVLTGDSYEENLQYFEEVLQENITLFNTLKSTYDFVILQSILKGKSTLSDAQVERYDEHKKDLEILKKVIKKYDEDGKLFKQVFKEDNGNGYVSYIGYYLNKNKKITAKKKISNIEFTKYVKGILEKQCDCEDEAVKYLLGKIEQENFLLKQISSINSVIPHQIHLFELDKILENLAKNYPSFNNKKEEFTKIEKIRKTFTFRIPYYVGPLNDYHKNNGGNAWIFRNKGEKIRPWNFEKIVDLHKSEEEFIKRMLNQCTYLPEETVLPKSSILYSEYMVLNELNNLRIKGKPLDTDVKLKLIEELFKKKTKVTLKSIRDYMIRNNFADKEDFDNSEKNLEIVSNMKSYIDFNNILGDKFELEMVEDLIEKITIHTGNKTLLKKYIEETYPDLSSSQIQKIINLKYKDWGRLSRKLLDGIKGRNKTDDVNTVINFMRNSSDNLMQIIEGKNYSFNEYIDNLRKKYIPQEISYEVVENLYVSPSVKKMIWQVIRVTEEITKVMGYDPDKIFIEMAKSEEEKKTTISRKNKLLDLYKAIKKDERDSQYEKLLTGLNKLDESELRSKKLYLYYTQMGRDMYTGEKIDLDKLFDSTHYDKDHIIPQSMKKDDSIINNLVLVNKNANQTTKGNIYPVPSSIRNNPDIYNYWKYLMEKEFISKEKYNRLIRNTPLTNEELGVFINRQLVETRQSTKAIKELFEKFYQKSKIIPVKASLASDLRKDMNTLKSREVNDLHHAHDAFLNIVAGDVWNREFTSNPINYVNENREGDKVKYSLSKYFTRPRKSKGKVIWTPEKGRKLIVDTLNKPSVLISNESHVKKGELFNATISGKKDYKKGKIYLPLKKDDRLKDVSKYGGYKAINGAFFFLVEHTKSKKRIRSIELFPLHLLSKFYEDKNTVLDYAINVLQLQDPKIIIDKINYRTEIIIDNFSYLISTKSNDGSITVKPNEQMYWRVDEISNLKKIENKYKKDAILTEEDRKIMESYIDKIYQQFKAGKYKNRRTTDTIIEKYEIIDLDTLDNKQLYQLLVAFISLSYKTSNNAVDFTVIGLGTECGKPRITNLPDNTYLVYKSITGIYEKRIRIK

SEQ ID NO: 429 - protein, 1348 aa, Finegoldia magna; identical to SEQ ID NO: 227

SEQ ID NO: 430 - protein, 1516 aa, Unknown
  Flavobacteriaceae bacterium
MLKQQKDKIIGMNKKILGLDLGTNSIGWALVKQDLENKYGEIIGCGSRIIPMSQDVLGKFDAGISISQTAERTNYRSVRKLIQRNTLRRERLHRVLHQLDFLPKHYNDSIDFEKKLGQFKTDKETKLNYFVNQHGKHEFLFKDSFNEMVKEFKEEQPELFYIKNNGKETKIPYDWTIYYLRKKALSKKISKEELSWLVLNFNQKRGYYQLRGEIDEEKEKNKRYEKLYVSEVVKTNNTIKKTGEYLYDIYFDNGWKYEKQTTKPQDWLHKHKEFIITTTTLKNGETKRTFKTVDSEKDWIAIKSKTEQDIKESNKTVGAFIYDTLLKNPTQKIRGSLVKTIERKFYREEFEKILKEQIKHRPEINVNTAIGKENYTKCVTELYPRNEAHANNILTNDFNYLFTKDILFYQRPLKSKKSEIANCQYEYRTYIKKKEKTGKEERVKQPLKATPKSHPLFQEFRLWQFIHNLKIYIRETTVGNKPLFDVDITDTFFTSENDWATLFEYLNNKKEIEQKHVLEYLVSKKIISKSEKTDYRWNYVEDKKYPGNETRVDFINRLKKVENLNVDEFLTSELEFKLWHIIYSVTDKNEYEKALENFAIRQNIDKDSFVNSFKKFPPFKSDYGAYSTKAIKKLLPLMRLGKFWDGSEIPKVVVEKITDIKTRLTSVNYDESLFKKDEKKILETIVDDITPKQLLKSFVKLKGKNHLAGLNTYQACYLVYERHSESSDITQWENPDDIDSFLNHFKQHSLRNPIVEQVVTETLRTVRDIWKYYGNGSPNYFNEIHIELGREMKNPADKRKQMSAKINENENTNQRIKGILQELMNDGVQDIKPYSPSQQEILKIYEEGISQNPNVDYSKVSEDEITKIKKSNNPTLKEIQRYKLWLEQKYISPYTGKPIPLSELFTPAYQIEHIIPQSRYFDNSLSNKIICESEVNEDKSNKTAYEYLKTNGGSIVHGHHLLSLKEYEDHCQHYFKKNRTKLKNLLSEEIPEGFINRQLNDSRYISKLIKGLLSNIVREENEQEATSKNIVPVTGSITSKLKQDWGLNDKWNEIIAPRFKRLNKMTNSNDFGYFDEKINTFRIQVPDAISRGFNKKRIDHRHHTLDALVIACCTKKHIQYLNSLNNEIIKHELKPSILIKNAQGDYTKHFMLPWNNFPIDCKNAIENTIVSFKQNLRVINKTSNKYQSYKDENGNLRLGKDGKPKKGLTKQTKGNNWAVRKAMHEDTFYGEIVDGENKGKLKIKTLLDTSFDVKKIEDKVLDKSIRTILINYLKQDKYKNLSKPHEEAFSPNGIIEMNKNIISLNNNIPHKPIKRVTLKHEKGKKFSIKTLLDKKTKFAKSATGTNVFFCIYKNINGKIKYHTPSFEEIIEIQKQEFEIKYKSKLNVPETLFDKKESFELLFYLQPNDLVYLPNDEELKNRQLIDFNNLNKKQIKRIYKFTDGSGTTANFIPYQVAKVIFNLNKKEQAKSSFKYPIQNEFGVGSPQSKNQKSIEGILIKERCIKLKIDRLGNISKA

SEQ ID NO: 431 - protein, 1629 aa, Unknown
  Francisella cf.
MNFKILPIAIDLGVKNTGVFSAFYQKGTSLERLDNKNGKVYELSKDSYTLLMNNRTARRHQRRGIDRKQLVKRLFKLIWTEQLNLEWDKDTQQAISFLFNRRGFSFITDGYSPEYLNIVPEQVKAILMDIFDDYNGEDDLDSYLKLATEQESKISEIYNKLMQKILEFKLRKLCTDIKDDKVSTKTLKEITSYEFELLADYLANYSEILKTQKFSYTDKQGNLKELSYYHHDKYNIQEFLKRHATINIQILDTLLTDDLDIWNFNFEKFDFDKNEEKLQNQEDKDHIQAHLHHFVFAVNKIKSEMASGGRHRSQYFQEITNVLDENNHQEGYLKNFCENLHNKKYSNLSVKNLVNLIGNLSNLELKPLRKYFNDKIHAKADHWDEQKFTETYCHWILGEWRVGVKDQDKKDGAKYSYKDLCNELKQKVTKAGLVDFLLELDPCRTIPPYLDNNNRKPPKCQSLILNPKFLDNQYPNWQQYLQELKKLQSIQNYLESFETDLKVLKSSKDQPYFVEYRSSNQQIASGQRDYKDLDARILQFIFDRVKASDELLLNEIYFQAKKLKQKASSELEKLESSKKLDEVIANSQLSQILKSQHTNGIFEQGTFLHLVCKYYKQRQRARDSRLYIMPEYRYDKKLHKYNNTGRFDDDNQLLTYCNHKPRQKRYQLLNDLAGVLQVSPNFLKDKIGSDDDLFISKWLVEHIRGFKKACEDSLKIQKDNRGLLNHKINIARNTKGKCEKEIFNLICKIEGSEDKKGNYKHGLAYELGVLLFGEPNEASKPEFDRKIKKFNSIYSFAQIQQIAFAERKGNANTCAVCSADNAHRMQQIKITEPVEDNKDKIILSAKAQRLPAITTRIVDGAVKKMATILAKNIVDDNWQNIKQVLSAKHQLHIPIITESNAFEFEPALADVKGKSLKDRRKKALERISPENIFKDKNNRIKEFAKGISAYSGANLTDGDFDGAKEELDHIIPRSHKKYGTLNDEANLICVTRGDNKNKGNRIFCLRDLANNYKLKQFETTDDLEIEKKIADTIWDANKKDFKFGNYRSFINLTPQEQKAFRHALFLADENPIKQAVIRAINNRNRTFVNGTQRYFAEVLANNIYLRAKKENLNTDKISFDYFGIPTIGNGRGIAEIRQLYEKVDSDIQAYAKGDKPQASYSHLIDAMLAFCIAADEHRNDGSIGLEIDKNYSLYPLDKNTGEVFTKDIFSQIKITDNEFSDKKLVRKKATEGFNTHRQMTRDGIYAENYLPILIHKELDEVRKGYTWKNSEEIKIFKGKKYDIQQLNNLLYCLKFVDKPISIDIQISTLEELRNILTTNNIAATAEYYYINLKTQKLHEYYIENYNTALGYKKYTKEMEFLRSLAYRSERVKIKSIDDVKQVLDKDSNFIIGKITLPFKKEWQRLYREWQNITIKDDYEFLKSFFNVKSITKLHKKVRKDFSLPISTNEGKFLVKRKTWDNNFIYQILNDSDSRVDGTKPFIPAFDISKNEIVEAIIDSFTSKNIFWLPKNIELQKVDNKNIFAIDTSKWFEVETPSDLRDIGVATIQYKIDNNSRPKVRVKLDYVIDDDSKINYFTNHSLLKSRYPDKVLEILKQSTIIEFESSGFNKTIKEMLGMTLAGIYNETSNN

SEQ ID NO: 432 - protein, 1646 aa, Unknown
  Francisella cf.
MNIKILPIAIDLGAKNTGVFSAFYQKGTSLESLDNKNGKVYELSKDSYTLLMNNRTARRHQRRGIDRKQLVKRLFKLIWTKQLNLEWNKDTQQTISFLLNRRGFSFITDGYSPEYLNIAPEAVKAILMSILDDYNGEDDLDSYLQSATENDSKIDELYNKLLQKALEFKLRKLCIDIKEDKVTTKTLKELSNTEFKLLANYLVDYDRILRTQKFSYTDKQGNLRELNYYHHDKYNIQEFLKRNIIINDVILEKLTDDLDIWNLNFDKFDFEKNLEKLENQEDKDYLQTHLHHFVFAVNKIKSEMASGGRHRSQYFQEITNVLVENNHQEGYLKNFCENLHNKKYSNLSVKNLVNLIGNLSNLELKPLRKYFNDKIHAKADYWDEQKFAETYSDWILGEWRVGAKDKDKKDGAKYSYKNLCDELKQKVGINQDGIINQTKSDFVDFLLELDPCRTIPPYLDNNNRKPPKCQSLILNPKFLDNKYPNWQQYLQELKKLQTVQNYLGNFEIDLKDLKSSKEQPYFVKYKSLNQQIASGQRDYKDLDARVLQFIFDRVKASDELLLNEIYSHAKKLKQNTSSELEKLELCKKLDEVIANSQLSQILKSQHVNGIFEQGTFLHLVCKYYKQRQRARDSRLYIMPEYRYDKKLDKYNNTGRFDDDNQLLTYCNHKPRQKRYQLLNDLAGVLQVSPNFLKDKIGSDDDLFISKWLVEHIRGFKKACEDSLKIQKDNRGLLNHKINIARNTKGKCEKEIFNLICKIEGSEDKKGNYKHGLAYELGVLLFGEPNQASKLEFDRKIKKFNSIYSFAQIQQIAFAERKGNANTCAVCSADNAHRMQQIKVAKPVEGNKDNIILSAKAQRLPAIPTRIVDGAVKKIATILARNIVDDNWDNIKQALSNNQQLHVPIITESNAFEFEPALADIKGKSLKDKRKKALERIDPENVFKDKNNRIKEFAKGISAYSDANLANGDFDGAKEELDHIIPRSHKKYGTLNDEANLICVTREDNQNRGNKAVFLYDLKPNYKLKQFNTTDDLEIEKKIADTIWDASKQDFKFGNYRSFINLTPQEQIAFRHALFLADKNPIKKAVIRAIDNRNRTFVNGTQRYFAEVLANNIYLRAKKENLATNRITFDYFGIETTNSNGRGIADVRKLYEKVDSDIQAYAKGDKPQDSYSHLIDAMIAFCVAADEHKNEGSIGLKMGNQYGLFPTPDKYDENTGEIISWHNDDIFRKIKVSDNQFSDKKLVRKKATEGFNTHRQMTRDGIYGESYLPILIHKNLNEVRKGYNWENSEEIKIFKGKKYDIQQLNNLVYCLKFVDKPISIDIQITTLEELRNILETNNISTTAEYYYINLKTQKLHEYYIENYNTALGYKKYTKEMEFLRSLAYRTERVKIKSIDDVSMILAKDSNFKAGKIELPFKTEWQRLYLEWQNTTIKDNHEFLKSYFSVKNATKQHKKVRKDFSLPISTNEGKLLVKRKTWDNNFIYQILNDSDSRADGTKPFIPAFDISKNEIVETIIKSFTSKNIFWLPKNIELQKVDNKSIFAIDTSRWFEVETPKDLIEIGVSTIQYKIDNNSRPKVRVKLDYVMDDDSKINYFMNHSLLKSRYPDKVLEILKQSTIIEFESSGFNKTIKEMLGMTLAGIYNETSNN

SEQ ID NO: 433 - protein, 1629 aa, Francisella novicida
MNFKILPIAIDLGVKNTGVFSAFYQKGTSLERLDNKNGKVYELSKDSYTLLMNNRTARRHQRRGIDRKQLVKKLFKLIWTEQLNLEWDKDTQQAISFLFNRRGFSFITDGYSPEYLNIVPEQVKAILMDIFDDYNGEDDLDSYLKLATEQESKISEIYNKLMQKILEFKLRKLCTDIKDDKVSTKTLKEITSYEFELLADYLANYSESLKTQKFSYTDKQGNLKELSYYHHDKYNIQEFLKRHATINDEILDTLLTDDLDIWNFNFEKFDFDKNEEKLQNQEDKDHTQAHLHHFVFAVNKIKSEMASGGRHRGQYFQEITNVLDENNHQEGYLKNFCENLHNKKYSNLSVKNLVNLIGNLSNLELKPLRKYFNDKIHAKADHWDEQKFTETYCHWILGEWRVGLKDQDKKEGAKYSYKDLCNELKQKVTNAGLIDFLLELDPCRTIPPYLDNNNRKPPKCQSLILNPKFLDNQYPNWQQYLQELKKLQIIQDYLESFETDLKVLKSSKDQPYFVEYKSSNQQIASGQRDYKDLDARILQFIFDRVKASDELLLNEIYFQAKKLKQKASSELEKLESSKKLDEVIANSQLSKILKSQHTNGIFEQGTFLHLVCKYYKQRQRARDSRLYIMPEYRYDKKLDKYNNTGRFDDDNQLLTYCNHKPRQKRYQLLNDLAGVLQVSPNFLKDKIGSDDDLFISKWLVEHIRGFKKACEDSLKIQKDNRGLLNHKINIARNTKGKCEKEIFNLICKIEGSEDKKGNYKHGLAYELGVLLFGEPNEASKPEFDRKIKKFNSIYSFAQIQQIAFAERKGNANTCAVCSADNAHRMQQIKITEPVEDNKDKIILSAKAQRLPAIPTRIVDGAVKKMATILAKNIVDDNWQNIKQVLSAKHQLHIPIITESNAFEFEPALADVKGKSLKDRRKKALERISPENIFKDKNNRIKEFAKGISAYSGANLTDGDFDGAKEELDHIIPRSHKKYGTLNDEANLICVTRDDNKNKGNRIFCLHDLANNYKLKQFETTDDLEIEKKIADTIWDASKKDFKFGNYRSFINLTPQEQKAFRHALFLADENPIKQAVIRAINNRNRTFVNGTQRYFAEVLANNIYLRAKKENLNTDKISFDYFGIPTIGNGRGIAEIRQLYEKVDSDIQVYAKGDKPQASYSHLIDAMLAFCIAADEHRNDGSIGLEIDKNYSLYPLDKNTGEVFTKDIFSQIKITDNEFSDKKLVRKKATEGFNTHRQMTRDGIYAENYLPILIHKELDEVRKGYTWKNSEEIKIFKGKKYDIQQLNNLLYCLKFVDKPISIDIQISTLEELRNILTTNNIAATAEYYYINLKTQKLHEYYIENYNTALGYKKYTKEMEFLRSLAYRSERVKIKSIDDVKQVLDKDSNFIIGKITLPFKKEWQRLYREWQNTTIKDDYEFLKSFFNVKSITKLHKKVRKDFSLPISTNEGKFLVKRKTWDNNFIYQILNDSDSRVDGTKPFIPAFDISKNEIVEAIIDSFTSKNIFWLPKNIELQKVDNKNIFAIDTSKWFEVETPSDLRDIGVATIQYKIDNNSRPKVRVKLDYVIDDDSKINYFTNHSLLKSRYPDKVLEILKQSTIIEFESSGFNKTIKEMLGMTLAGIYNETSNN

SEQ ID NO: 434 - protein, 1629 aa, Francisella novicida
MNFKILPIAIDLGVKNTGVFSAFYQKGTSLERLDNKNGKVYELSKDSYTLLMNNRTARRHQRRGIDRKQLVKRLFKLIWTEQLNLEWDKDTQQAISFLFNRRGFSFITDGYSPEYLNIVPEQVKAILMDIFDDYNGEDDLDSYLKLATEQESKISEIYNKLMQKILEFKLMKLCTDIKDDKVSTKTLKEITSYEFELLADYLANYSESLKTQKFSYTDKQGNLKELSYYHHDKYNIQEFLKRHATINDRILDTLLTDDLDIWNFNFEKFDFDKNEEKLQNQEDKDHIQAHLHHFVFAVNKIKSEMASGGRHRSQYFQEITNVLDENNHQEGYLKNFCENLHNKKYSNLSVKNLVNLIGNLSNLELKPLRKYFNDKIHAKADHWDEQKFTETYCHWILGEWRVGVKDQDKKDGAKYSYKDLCNELKQKVTKAGLVDFLLELDPCRTIPPYLDNNNRKPPKCQSLILNPKFLDNQYPNWQQYLQELKKLQSIQNYLDSFETDLKVLKSSKDQPYFVEYKSSNQQIASGQRDYKDLDARILQFIFDRVKASDELLLNEIYFQAKKLKQKASSELEKLESSKKLDEVIANSQLSQILKSQHTNGIFEQGTFLHLVCKYYKQRQRARDSRLYIMPEYRYDKKLHKYNNTGRFDDDNQLLTYCNHKPRQKRYQLLNDLAGVLQVSPNFLKDKIGSDDDLFISKWLVEHIRGFKKACEDSLKIQKDNRGLLNHKINIARNTKGKCEKEIFNLICKIEGSEDKKGNYKHGLAYELGVLLFGEPNEASKPEFDRKIKKFNSIYSFAQIQQIAFAERKGNANTCAVCSADNAHRMQQIKITEPVEDNKDKIILSAKAQRLPAIPTRIVDGAVKKMATILAKNIVDDNWQNIKQVLSAKHQLHIPIITESNAFEFEPALADVKGKSLKDRRKKALERISPENIFKDKNNRIKEFAKGISAYSGANLTDGDFDGAKEELDHIIPRSHKKYGTLNDEANLICVTRGDNKNKGNRIFCLRDLADNYKLKQFETTDDLEIEKKIADTIWDANKKDFKFGNYRSFINLTPQEQKAFRHALFLADENPIKQAVIRAINNRNRTFVNGTQRYFAEVLANNIYLRAKKENLNTDKISFDYFGIPTIGNGRGIAEIRQLYEKVDSDIQAYAKGDKPQASYSHLIDAMLAFCIAADEHRNDGSIGLEIDKNYSLYPLDKNTGEVFTKDIFSQIKITDNEFSDKKLVRKKAIEGFNTHRQMTRDGIYAENYLPILIHKELNEVRKGYTWKNSEEIKIFKGKKYDIQQLNNLVYCLKFVDKPISIDIQISTLEELRNILTTNNIAATAEYYYINLKTQKLHEYYIENYNTALGYKKYSKEMEFLRSLAYRSERVKIKSIDDVKQVLDKDSNFIIGKITLPFKKEWQRLYREWQNTTIKDDYEFLKSFFNVKSITKLHKKVRKDFSLPISTNEGKFLVKRKTWDNNFIYQILNDSDSRVDGTKPFIPAFDISKNEIVEAIIDSFTSKNIFWLPKNIELQKVDNKNIFAIDTSKWFEVETPSDLRDIGVATIQYKIDNNSRPKVRVKLDYVIDDDSKINYFTNHSLLKSRYPDKVLEILKQSTTIEFESSGFNKTIKEMLGMTLAGIYNETSNN

SEQ ID NO: 435 - protein, 244 aa, Francisella tularensis
ARKQNSEIYNKLMQKILEFKLRKLCTDIKDDKVSTKTLKEITSYEFELLADYLANYSESLKTQKFSYTDKQGNLKELSYYHHDKYNIQEFLKRHATINDEILDTLLTDDFDIWNFNFEKFDFDKNEEKLQNQEDKDHTQAYLHHFVFAVNKIKSEMASGGRHRSQYFQEITNVLDENNHQEGYLKNFCENLHNKKYSNLSVKNLVNLVGNLSNLELKPLRKYFNDKNLIIGMSKSLQKLIATGY

SEQ ID NO: 436 - protein, 501 aa, Francisella tularensis
MEIEKKIADTIWDASKQDFKFGNYRSFINLTPQEQKAFRYALFLADENSIKQAVIRAINNRNRTFVNGTQRYFAEVLANNIYLRAKKENLNTDKISFDYFGIPTIGNGRGIADIRQLYEKVDSDIQAYAKGDKPQASYSHLIDAMIAFCVAADEHRNDGSIGLEIDKNYSLYLLDKNTGEVFTKDIFSQIKITDNEFSDKKLVRKKATEGFNTHRQMTRDGIYAENYLPILIHKELDEVRKGYTWGNSEELKIHKGKKYNIQQLNNIVYCLKFIDKSISIDIQISTLEELRNILTTNNIAATAEYYYINLKNQKLHEYYIENYNTALDYKKYSKEMEFLRSLAYRSERVKIKSIDDVKQVLDKDSNFIIGKITLPFKKEWQRLYLEWQNTTIKDDYEFLKSFFNVKSITKLHKKVRKDFSLPISTNEGKFLVKRKTWDNNFIYQILNDSDSRVDGTKPFIPAFDISKNEIVEAIIDSFTSKNIFWLPKNIELQNVDKIFLL

SEQ ID NO: 437 - protein, 158 aa, Francisella tularensis
MIDFLLELDPCITIPPYLDNNNRKPPKCQSLILNPKFLDNQYPNWQQYLQELKKLQSIQDYLDSFETDLKDLKSSKDQPYFVEYKSSNQQMASGQRDYKDLDARILQFIFDRVKASDELLLNEIYFQAKKLKQKASSELEKLESSKKLDEVIANSQLS

SEQ ID NO: 438 - protein, 878 aa, Francisella tularensis
MLNDLAGVLQVSRNQLLSSVEEWFQQAQRVGEISKSQDEQIFEWLKSFKIASYCKAAVEMQKQYRGTLKNAIQTAIFRQSENINKNKNKNKNTGNQQQALSENSKDVKSLTADEKKLLKLIENIAKASQKIGESLGLNDKQIKKFNSIYNFAQIQQIAFAERKGNANTCAVYSADNAHRMQQIKITELVEDNKDNIILSAKAQRLPAIPTRIVDGAVKKMATILAKNIVDDNWQNIKQVLSAKHQLHIPIITESNAFEFEPALADVKGKSLKDRRKKALERISPENIFKDKNNRIKEFAKGISAYSGANLTDGDFDGAKEELDHIIPRSYKKYGTLNDEVNLICVTRDDNKNKGKRIFCLNDLANNYKLKQFETTDDLEIEKKIADTIWDASKQDFKFGNYRSFINLIPQEQKAFRYALFLADENSIKQAVIRAINNRNRTFVNGTQRYFAEVLANNIYLRAKKENLNTDKISFDYFGIPTIGNGRGIADIRQLYEKVDSDIQAYAKGDKPQASYSHLIDAMIAFCVAADEHRNDGSIGLEIDKNYSLYPLDKNTGEVFTKDIFSQIKITDNEFSDKKLVRKKATEGFNTHRQMTRDGIYAENYLPILIHKELDEVRKGYTWGNSEELKIHKGKKYNIQQLNNIVYCLKFIDKSISIDIQISTLEELRNILTTNNIAATAEYYYINLKNQKLHEYYIENYNTALDYKKYSKEMEFLRSLAYRSERVKIKSIDDVKQVLDKDSNFIIGKITLPFKKEWQRLYLEWQNTTIKDDYEFLKSFFNVKSINKLHKKVRKDFSLPISTNEGKFLVKRKTWDNNFIYQILNDSDSRVDGTKPFIPAFDISKNEIVEAIIDSFTSKNIFWLPKNIELQKVDKIFLL

SEQ ID NO: 439 - protein, 292 aa, Francisella tularensis
MLNDLAGVLQVSRNQLLSSVEEWFQQAQRVGEISKSQDEQIFEWLKSFKIASYCKAAVEMQKQYRGTLKNAIQTAIFRQSENINKNKNKNTGNQQQALSENSKDVKSLTADEKKLLKLIENIAKASQKIGESLGLNDKQIKKFNSIYNFAQIQQIAFAERKGNANTCAVYSADNAHRMQQIKITELVEDNKDNIILSAKAQRLPAIPTRIVDGAVKKMVTILAKNIVDDNWQNIKQVLSAKHQLHIPIITESNAFEFEPALADVKGKSLKDRRKKALERISPENIFKDKNIC

SEQ ID NO: 440 - protein, 53 aa, Francisella tularensis
MNHSLLKSRYPDKVLEILKQSTIIEFESSGFNKTIKEMLGMTLAGIYNETSNN

SEQ ID NO: 441 - protein, 393 aa, Francisella tularensis
MNVKILPIAIDLDVKNTGVFSAFYQKGTSLEKLDNKNGKVYELSKDSYTLLMNNRTAQRHQRRGIDRKQLVKRLFKLVWTEQLNLEWDKDTQQAISFLFNRRGFSFITDGYSTEYLNIVPEQVKAILMDIFDDYNGEDDLDSYLKLATEQESKISEIYNKLMQKILEFKLRKLCTDIKDDKVSTKTLKEITSYEFELLADYLANYSESLKTQKFSYTDKQGNLKELSYYHHDKYNIQEFLKRHATINDEILDTLLTDDFDIWNFNFEKFDFDKNEEKLQNQEDKDHTQAYLHHFVFAVNKIKSEMASGGRHRSQYFQEITNVLDENNHQEGYLKNFCENLHNKKYSNLSVKNLVNLVGNLSNLELKPLRKYFNDKNLIIGMSKSLQKLIATGY

SEQ ID NO: 442 - protein, 1629 aa, Francisella tularensis
MNVKILPIAIDLGVKNTGVFSAFYQKGTSLERLDNKNGKVYELSKDSYTLLMNNRTARRHQRRGIDRKQLVKRLFKLIWTEQLNLEWDKDTQQAISFLFNRRGFSFITDGYSPEYLNIVPEQVKAILMDIFDDYNGEDDLDSYLKLATEQESKISEIYNKLMQKILEFKLRKLCTDIKDDKVSTKTLKEITSYEFELLADYLANYSEILKTQKFSYTDKQGNLKELSYYHHDKYNIQEFLKRHATINDEILDTLLTDDLDIWNFNFEKFDFDKNEEKLQNQEDKDHTQAHLHHFVFAVNKIKSEMASGGRHRGQYFQEITNVLDENNHQEGYLKNFCENLHNKKYSNLSVKNLVNLIGNLSNLELKPLRKYFNDKIHAKADHWDEQKFTETYCHWILGEWRVGVKDQDKKDGAKYSYKDLCNELKQKVTKAGLVDFLLELDPCRTIPPYLDNNNRKPPKCQSLILNPKFLDNQYPNWQQYLQELKKLQSIQNYLESFETDLKVLKSSKDQPYFVEYKSSNQQIASGQRDYKDLDARILQFIFDRVKASDELLLNEIYFQAKKLKQKASSELEKLESSKKLDEVIANSQLSQILKSQHTNGIFEQGTFLHLVCKYYKQRQRARDSRLYIMPEYRYDKKLDKYNNTGRFDDDNQLLTYCNHKPRQKRYQLLNDLAGVLQVSPNFLKDKIGSDDDLFISKWLVEHIRGFKKACEDSLKIQKDNRGLLNHKINIARNTKGKCEKEIFNLICKIEGSEDKKGNYKHGLAYELGVLLFGEPNEASKPEFDRKIKKFNSIYSFAQIQQIAFAERKGNANTCAVCSADNAHRMQQIKITEPVEDNKDKIILSAKAQRLPAIPTRIVDGAVKKMATILAKNIVDDNWQNIKQVLSAKHQLHIPIITESNAFEFEPALADVKGKSIKDRRKKALERISPENIFKDKNNRIKEFAKGISAYSGDNLASGDFDGAKEELDHIIPRSHKKYGTLNDEANLICVTRDDNKNKGNRIFCLHDLANNYKLKQFETTDDLEIEKKIADTIWDASKKDFKFGNYRSFINLTPQEQKAFRHALFLADENPIKQAVIRAINNRNRTFVNGTQRYFAEVLANNIYLRAKKENLNTDKISFDYFGIPTIGNGRGIVEIRQLYEKVDSDIQAYAKGDKPQASYSHLIDAMLAFCIAADEHRNDGSIGLEIDKNYSLYPLDKNTGEVFTKDIFSQIKITNNEFSDKKLVRKKATEGFNTHRQMTRDGIYAENYLPILIHKELDEVRKGYTWGNSEELKIHKGKKYDIQQLNNLVYCLKFIDKSISIDIQISTLEELRNILTTNNIATTAEYYYINLKTQKLHEYYIENYNTALGYKKYTKEMEFLRSLAYRSERVKIKSIDDVKQVLDKDSNFIIGKITLPFKKEWQRLYREWQNTTIKDDYEFLKSFFNVKSITKLHKKVRKDFSLPISTNEGKFLVKRKTWDNNFIYQILNDSDSRVDGTKPFIPAFDISKNEIVEAIIDSFTSKNIFWLPKNIELQKVDNKNIFAIDTSKWFEVETPSDLRDIGVATIQYKIDNNSRPKVRVKLDYVIDDDSKINYFTNHSLLKSRYPDKVLEILKQSTIIEFESSGFNKTIKEMLGMTLAGIYNETSNN

SEQ ID NO: 443 - protein, 285 aa, Francisella tularensis
MTRDGIYAENYLPILIHKELDEVRKGYTWGNSEELKIHKGKKYNIQQLNNIVYCLKFIDKSISIDIQISTLEELRNILTTNNIAATAEYYYINLKNQKLHEYYIENYNTALDYKKYSKEMEFLRSLAYRSERVKIKSIDDVKQVLDKDSNFIIGKITLPFKKEWQRLYLEWQNTTIKDDYEFLKSFFNVKSITKLHKKVRKDFSLPISTNEGKFLVKRKTWDNNFIYQILNDSDSRVDGTKPFIPAFDISKNEIVEAIIDSFTSKNIFWLPKNIELQKVDKIFLL

SEQ ID NO: 444 - protein, 1323 aa, Fructobacillus fructosus
MVYDVGLDIGTGSVGWVALDENGKLARAKGKNLVGVRLFDTAQTAADRRGFRTTRRRLSRRKWRLRLLDELFSAEINEIDSSFFQRLKYSYVHPKDEENKAHYYGGYLFPTEEETKKFHRSYPTIYHLRQELMAQPNKRFDIREIYLAIHHLVKYRGHFLSSQEKITIGSTYNPEDLANAIEVYADEKGLSWELNNPEQLTEIISGEAGYGLNKSMKADEALKLFEFDNNQDKVAIKTLLAGLTGNQIDFAKLFGKDISDKDEAKLWKLKLDDEALEEKSQTILSQLTDEEIELFHAVVQAYDGFVLIGLLNGADSVSAAMVQLYDQHREDRKLLKSLAQKAGLKHKRFSEIYEQLALATDEATIKNGISTARELVEESNLSKEVKEDTLRRLDENEFLPKQRTKANSVIPHQLHLAELQKILQNQGQYYPFLLDTFEKEDGQDNKIEELLRFRIPYYVGPLVTKKDVEHAGGDADNHWVERNEGFEKSRVTPWNFDKVFNRDKAARDFIERLTGNDTYLIGEKTLPQNSLRYQLFTVLNELNNVRVNGKKFDSKTKADLINDLFKARKTVSLSALKDYLKAQGKGDVTITGLADESKFNSSLSSYNDLKKTFDAEYLENEDNQETLEKIIEIQTVFEDSKIASRELSKLPLDDDQVKKLSQTHYTGWGRLSEKLLDSKIIDERGQKVSILDKLKSTSQNFMSIINNDKYGVQAWITEQNTGSSKLTFDEKVNELTTSPANKRGIKQSFAVLNDIKKAMKEEPRRVYLEFAREDQTSVRSVPRYNQLKEKYQSKSLSEEAKVLKKTLDGNKNKMSDDRYFLYFQQQGKDMYTGRPINFERLSQDYDIDHIIPQAFTKDDSLDNRVLVSRPENARKSDSFAYTDEVQKQDGSLWTSLLKSGFINRKKYERLTKAGKYLDGQKTGFIARQLVETRQIIKNVASLIEGEYENSKAVAIRSEITADMRLLVGIKKHREINSFHHAFDALLITAAGQYMQNRYPDRDSTNVYNEFDRYTNDYLKNLRQLSSRDEVRRLKSFGFVVGTMRKGNEDWSEENTSYLRKVMMFKNILTTKKTEKDRGPLNKETIFSPKSGKKLIPLNSKRSDTALYGGYSNVYSAYMTLVRANGKNLLIKIPISIANQIEVGNLKINDYIVNNPAIKKFEKILISKLPLGQLVNEDGNLIYLASNEYRHNAKQLWLSTTDADKIASISENSSDEELLEAYDILTSENVKNRFPFFKKDIDKLSQVRDEFLDSDKRIAVIQTILRGLQIDAAYQAPVKIISKKVSDWHKLQQSGGIKLSDNSEMIYQSATGIFETRVKISDLL

SEQ ID NO: 445 - protein, 1367 aa, Unknown
  Fusobacterium sp.
MKKQKFSDYYLGFDIGTNSVGWCVTDLDYNVLRFNKKDMWGSRLFDEAKTAAERRVQRNSRRRLKRRKWRLNLLEEIFSDEIMKIDSNFFRRLKESSLWLEDKNSKEKFTLFNDDNYKDYDFYKQYPTIFHLRDELIKNPEKKDIRLIYLALHSIFKSRGHFLFEGQNLKEIKNFETLYNNLISFLEDNGINKSIDKDNIKKLEKIICDSGKGLKDKEKEFKEIFNSDKQLVAIFKLSVGSSVSLNDLFDTDEYKKEEVEKEKISFREQIYEDDKPIYYSILGEKIELLDIAKSFYDFMVLNNILSDSNYISEAKVKLYEEHKKDLKNLKYIIRKYNKENYDKLFKDKNENNYPAYIGLNKEKGKKEVVEKSGLKIDDLIKVIKGYLPKPERIEEKDKTIFNEILNKIELKTILPKQRISDNGTLPYQIHEVELEKILENQSKYYDFLNYEENGVSTKDKLLKTFKFRIPYYVGPLNSYHKDKGGNSWIVRKEEGKILPWNFEQKVDIEKSAEEFIKRMTNKCTYLNGEDVIPKDSFLYSEYIILNELNKVQVNDEFLNEENKRKIIDELFKENKKVSEKKFKEYLLVNQIANRTVELKGIKDSFNSNYVSYIKFKDIFGEKLNLDIYKEISEKSILWKCLYGDDKKIFEKKIKNEYGDILNKDEIKKINSFKFNTWGRLSEKLLTGIEFINLETGECYSSVMEALRRTNYNLMELLSSKFTLQESIDNGNKEMNEVSYRDLIEESYVSPSLKRAILQTLKIYEEIKKITGRVPKKVFIEMARGGDETMKNKKIPARQEQLKKLYDSCGNDIANFSIDIKKMKSSLSSYDNNSLRQKKLYLYYLQFGKCMYTGREIDLDRLLQNNDTYDIDHIYPRSKVIKDDSFDNLVLVLKNENAEKSNEYPVKKEIQEKMKSFWRFLKEKNFISDEKYKRLTGKDDFELRGFMARQLVNVRQTTKEVGKILQQIEPEIKIVYSKAEIASSFREMFDFIKVRELNDTHHAKDAYLNIVAGNVYNTKFTEKPYRYLQEIKENYDVKKIYNYDIKNAWDKENSLEIVKKNMKKNTVNITRFIKEEKGQLFDLNPIKKGETSNEIISIKPKLYNGKEEKLNEKYGYYKSLNPAYFLYVEHKEKNKRIKSFERVNLVDVNNIKDEKSLVKYLIENKKLVEPRLIKKVYKRQVILINDYPYSIVALDSNKLMDFENLKPLFLENKYEKILKNVIKFLEDNQGKSEENYKFIYLKKKDRYEKNETLESVKDRYNLEFNEMYDKFLEKLDSKDYKNYINNKKYKNLLDVKEKFIKLNLFDKAFTLKSFLDLFNRKTMADFSKVGLTKYLGKIQKISSNVLSKNELYLLEESVTGLFVKKIKL

SEQ ID NO: 446 - protein, 1367 aa, Unknown
  Fusobacterium sp.
MKKQKFSDYYLGFDIGTNSVGWCVTDLDYNVLRFNKKDMWGSRLFDEAKTAAERRVQRNSRRRLKRRKWRLNLLEEIFSDEIMKIDSNFFRRLKESSLWLEDKNSKEKFTLFNDDNYKDYDFYKQYPTIFHLRDELIKNPEKKDIRLIYLALHSIFKSRGHFLFEGQNLKEIKNFETLYNNLISFLEDNGINKSIDKDNIKKLEKIICDSGKGLKDKEKEFKEIFNSDKQLVAIFKLSVGSSVSLNDLFDTDEYKKEEVEKEKISFREQIYEDDKPIYYSILGEKIELLDIAKSFYDFMVLNNILSDSNYISEAKVKLYEEHKKDLKNLKYIIRKYNKENYDKLFKDKNENNYPAYIGLNKEKGKKEVVEKSGLKIDDLIKVIKGYLPKPERIEEKDKIIFNEILNKIELKTILPKQRISDNGTLPYQIHEVELEKILENQSKYYDFLNYEENGVSTKDKLLKTFKFRIPYYVGPLNSYHKDKGGNSWIVRKEEGKILPWNFEQKVDIEKSAEEFIKRMTNKCTYLNGEDVIPKDSFLYSEYIILNELNKVQVNDEFLNEENKRKIIDELFKENKKVSEKKFKEYLLVNQIANRTVELKGIKDSFNSNYVSYIKFKDIFGEKLNLDIYKEISEKSILWKCLYGDDKKIFEKKIKNEYGDILNKDEIKKINSFKFNTWGRLSEKLLTGIEFINLETGECYSSVMEALRRTNYNLMELLSSKFTLQESIDNGNKEMNEVSYRDLIEESYVSPSLKRAILQTLKIYEEIKKITGRVPKKVFIEMARGGDETMKNKKIPARQEQLKKLYDSCGNDIANFSIDIKKMKSSLSSYDNNSLRQKKLYLYYLQFGKCMYTGREIDLDRLLQNNDTYDIDHIYPRSKVIKDDSFDNLVLVLKNENAEKSNEYPVKKEIQEKMKSFWRFLKEKNFISDEKYKRLTGKDDFELRGFMARQLVNVRQTTKEVGKILQQIEPEIKIVYSKAEIASSFREMFDFIKVRELNDTHHAKDAYLNIVAGNVYNTKFTEKPYRYLQEIKENYDVKKIYNYDIKNAWDKENSLEIVKKNMKKNTVNITRFIKEEKGQLFDLNPIKKGETSNEIISIKPKLYNGKEEKLNEKYGYYKSLNPAYFLYVEHKEKNKRIKSFERVNLVDVNNIKDEKSLVKYLIENKKLVEPRLIKKVYKRQVILINDYPYSIVALDSNKLMDFENLKPLFLENKYEKILKNVIKFLEDNQGKSEENYKFIYLKKKDRYEKNETLESVKDRYNLEFNEMYDKFLEKLDSKDYKNYINNKKYKNLLDVKEKFIKLNLFDKAFTLKSFLDLFNRKTMADFSKVGLTKYLGKIQKISSNVLSKNELYLLEESVTGLFVKKIKL

SEQ ID NO: 447 - protein, 1367 aa, Unknown
  Fusobacterium sp.
MKKQQFSDYYLGFDIGTNSVGWCVTDFNYNVLRFNKKDMWGSRLFDEAKTAAERRVQRNSRRRLKRRKWRLNLLEEIFSDEILKIDSNFFRRLKESSLWLEDKSSKEKFTLFNDDNYKDYDFYKQYPTIFHLRNELIKNPEKKDIRLVYLALHSIFKSRGHFLFEGQNLKDIKNFETLYNNLMAFLEDNDIYKNIDSSYIGNLENIICDSKKGLKDKEKEFKEIFNSDKQLVGFFKLSVGSSVSLNDLFDTDEYKKGEVEKEKISFREQIYEDDKPIYYSILGEKIEFLDIAKSFYDFMVLNNILADSQYISEAKVKLYDEHKRDLKNLKYIIRKYNKENYDKLFKDKNESNYSAYIGLNKEKGKKEVIEKSRLKIDDFAKIIKGYLPKAEKIDEKDRSIFNEILDKIELKTILPKQRISDNGTLPYQIHEAELEKILENQAKYYDFLNHEENGISTKDKLLMTFKFRIPYYVGPLNSYHKNKGGNSWIVRKEEGKILPWNFEQKVDIEKSAEEFIKRMTNKCTYLNGEDVIPKDSFLYSEYIILNELNKVQVNDEFLNKEIKKKIIEDLFKKSKKISEKNFREYLLVNQITNKTVELKGVKDAFNSNYVSYIKFKDIFGDKLNLDIYKEISEKSILWKCLYGDDKKIFEKKIKSVYGDILTKDEIKKINSFKFNTWGRLSEKLLTEIEFIDLETGECYSSVMDALRRTNYNLMELLSSKFTLQENIDNENKEVSEFSYRDLVEESYVSPSLKRAILQTLKIYEEIRKITGRIPKKVFIEMARGGDETMKNKKIPARQEQLKKLYDSCGKDISNFSIDIKEMKNSLNSYDNNSLRQKKLYLYYLQFGKCMYTGKEIDLNRLLQNNDTYDIDHIYPRSKVIKDDSFDNLVLVLKNENAEKSNEYPLKKEIQEKMKSFWKFLKEKNFISDEKYKRLTGKDEFELRGFMARQLVNVRQTTKEAGKILQQIEPEIKIVYSKAEIASSFREMFDFIKVRELNDTHHAKDAYLNIVAGNVYNTKFTEKPYRYLQEIKENYDVKKIYNYDIKNAWDKEKSLEIVKKNMEKNTVNITRFIKEEKGQLFDLNPIRKGETSNEIIAIKPKFYEGSTEKLNEKYGYYKSLNPAYFIYVEHKEKNKIIRSFERVNLVDVNKIKDEKSLIKYLIENKGLIEPKVIKKVYKRQVILINNFPYSIVALDSNKLMDFENLKPLFLERKYEKILKNAIKFLEDNQGKTEEYYKFLYLKKKDRNEKNETIDSVKERYNIEFNEMYDKFLEKLDSKDYKNYINNKKYSELVNVKEKFIKLNLFDKAFTLKSFLDLFNRKTMADFSKVGLTKYLGKIQKISSNVLSKNELHLLEESVTGLFVKKIKL

SEQ ID NO: 448 - protein, 1391 aa, Unknown
  Galbibacter sp.
MKTILGLDLGTNSIGWALVKEAENENEVSDIIKLGVRVNPLTVDELTNFEGGKAYSNNAERTLKRGARRNLQRYKLRRENLIEILLKNGLINKDTALTEVGKETTHQTLKLRSKSANEKVSLEDLAKILLSINKKRGYKSSRKVNAEDDGVAIDGMEVAKLLYDENMTPGEYVLRLLESGKKHLPDFYRSDLQEEFNLVWKKQSEFYPLILTKELFFELHGKNKSQTWAICKEPLGIVGVKLKGSAKEQKFARYRLRKEALTQQIELEHLAIVLQDINNDSNKSSGYLGAISDRSKELFFNKETVGQYQYKQLQKDPNTSLKNQVFYRQDYLDEFEVIWRNQAKFYPQLTNELKQEIRDVVIFYQRKLKSQKNLISFCQFESTQQNYVEKETGKTKIRTIGRRVIPRSSPLFQEFKIWQSLNNLKFVNSESNQIIQFIELEDDVKKVVFDELNLRGDLKPNQVLKILSKYMKIGKLTQWKCNLEEIEGNRTNSALYNVFQMIAEEEGYGFNWGKKSALEIKSELKAIFSSIGINDSILDFDFSKKLDQQLSYQLWHLLYSAEEGNSKITEEDKFTYGNTGVALKKKLHLKFGFKPEYSTLISNLRFTSDYGNLSSKAISKILPFLRDGSDYSKACQYAGYNHSNSLSADELDNRELKPKLELLKKNSLRNPVVEKILNQMVNVVNQVIDNYGKPDEVRIELARELKKSAKERSQMTKNISDATRRNAEIKKYLSKEFGIPNPTKGDVIRYRLWEELASNGYKDLFRDKYIPKEKLFSNEIDIEHIIPKALLFDDSFSNKTLAFKVDNLKKADRTAFDFMSTDFSKDVDSYIGRIETLHKDGKISSSKYKKLMIPKSKLVDGFIERDLRNTQYIAKQARKMLLEVFKTVVPTTGKITDKLREDWDLINVMKELNFPKYKALGLTKKIERFDVGSEKIKSINVIEGWSKRNDHRHHAMDALAVAFTTHNHIQYLNYLNARKDIHHEMHGTIKSIENQIIGKDVMGKRRFIPPISDLRMKAKLQIESILISFKNKNKVVTWSVNKTKLKGKDNYNKRRQLTPRGQLHKETVYGKIKLIDPKPLKLNNKFTLVRASMIVDKVHREIVLQHLSKYDNNSEVAFDSKTIKIDPILIEGIGLKEVVCYEDVFKIRKKISGDNFKNEKHLEKVIDEKVKQILKDRVIKFQGNFKEAFSNLEENPIWLNKSKGIAVKSVAIKGVNNAESLHEGKDHFGDQILDKNKKQIPVDFVSTGNNHHVGIYEDKDGNLQERVVSFFEAVTRVNEGLPIIDKTYNSDIGWKFKFTMKQNEMFVFPSDDFDPNEFDLTDGKNAAKISPNLYRVQKIATKNYMFRHHLETVVTNDLEFTYKSIRSTGWLRNLVKVRINHLGEIVYVGEY

SEQ ID NO: 449 - protein, 1186 aa, Gardnerella vaginalis
MEGNISYAIGIDVGLNSVGLAAIRLDDYGEPIRILKAMSVIHDAGIDPNGAKESDTRKAISGVARRVRRLYRQRRRRLQKLDFLLQSLGWPVVENKDLDFSDSFIPWIFRAKLADEYIADEEQRKQMLSVAIRHIARHRGWRNPYQSIKSMMQETEYSEFYNELLKNIEKLAPGVGCEGSTPAQLVRDYLLSQQGKASRRLRITTGGRRKNHPHSLDPVLPRKLMQSDNMLEILNIFNVQHIDDKYVREQIINAVFYAESPRGSAENRVGKDAITGKGKRALKASLAFQKYRIISTISNLRIRENSKERCLTIEEKQNVYKLLTTSIDKSSKRKSAEAPLYTWIDVADCLGIERYKLRGVGSQIGDGESVGNRPPMLNSELAILYANNKSLGQSLITWWLASNRTQEDKEALIEILSNTVDIEAIHDNPEYQDKYGSAIAFIDSMNETEIAALENISLPDGRAAYSLETLDELNKQMLETDDDLFEARKKLFNLPNNWRPAEAPIAEPTGNPSVDRVLKIVHRFLISAKNRWGNPERINIEHVRSGFQSKKMANSYKELLDKRTEGKENLKAMMRNSLHLGTSDSISDADIRRYEAVQRQNGQCLYCGSEITYHTCELDHIVPRKGPGSTNTRENLVATCSSCNAQKCNTPFATWCEQSTYCKNHDISADSAINRVRAFIFPPNSYDKRGANQFKKEVIARLKQKVGDEAFDNRSIESVAWMANELHRRIDWYYNSQNYQTNNGISDISNKAQTNVGVYAGSLTAIARRMSGIDGKLEFFDGRRKTRFDRRHHAVDASVIAMMTPGIAQILAIKCNLRETQLLQGNKVVPGGIDWKEYPTANDQGYQQYANWSVRMNALLKLLNEEMRADRIAVVNSIRLRYSNSSVHQYEVNALLKLHVGDEIDSETIRRSSTPALYCALTRNPDYDVNNGFPENPGRTILLHNKKLNADDSITFFKAQAVQLFVREGSAKIGNSIHHLRIYEYFEKLKSGKIKKSYGMIRVFQNDLHRHIHEDLFSCDLPEQSISMRYADTKVAHAVQTGNANYLGYLVPGDEIIVDFSHITLSENIGKFVEFLNKIGADCTAYRHWVVVGTDTEKVLILKPSMISSEGIDKLYSNCERNNFDYSSYEKSINEILAGKGWRVSVNVLAQYKAATIRRNALGEVRWASRSHLPISWSWDTGENRE

SEQ ID NO: 450 - protein, 1186 aa, Gardnerella vaginalis
MEGNISYAIGIDVGLNSVGLAAIRLDNNGEPIRILKAMSVIHDAGIDPNGAKESDTRKAISGVARRVRRLYRQRRRRLQKLDFLLHSLGFPVVENKDLDFSDSFIPWIFRAKLADEYIADEKQRKQMLSVAIRHIARHRGWRNPYQSIKSMTQETEYSEFYNELLKNIEKFAPGVGCEGSTPAQLVRDYLLLQQGKASRRLRITTDEKRKNHPNSLNPILPRKLMQSDNMLEILNIFNVQHIDDKYVREQIINAVFYAKSPRGSAENRVGKDAITGKGKRALKASLAFQKYRIISTISNLRIRENSKERCLTIEEKQSVYKLLTTSTDESSKEKSAEAPLYTWIDVADCLGIERYKLRGVGSQIGDGESVGNRPPMLNSELAIIYANNKSLGKSLLTWWLDANRTQEDKEALIEILSNTVDIEAIHDNPEYQDKYGSAIAFIDSMDETEIAALENISLPDGRAAYSLETLDKLNKQMLETDDDLFEARKKLFNLPNNWRPSEAPIAEPTGNPSVDRVLKIVHRFLISAKNRWGNPERINIEHVRSGFKSKKMANSYKELLDKRTKGKENLKAMMRNSLHLGMSDSISDADIRRYEAVQRQNGQCLYCGSEITYHTCELDHIVPRKGPGSTNTRENLVATCSLCNAQKCNTPFSTWCEQSTYCKNHDISVDSAINRVRAFIFPPNSYDKRGANQFKKEVIARLKQKVGDEAFDNRSIESVAWMANELHRRIDWYYNSQNYQTNNGISDITNKAQTNVGVYAGSLTAIARRMSGIDGKLEFFDGRRKTRFDRRHHAVDASVIAMMTPGIAQILAIKCNLRETQLLQGNKVVPGGIDWKEYPTANDQGYQQYANWSVRMNALLKLLNEEMRADRIAVVNSIRLRYNNSSVHQYKVNALLKLHVGDEIDSGTIRRSSTPALYCALTRNPDYDVNNGLPENPNRAILLHDKKLNADDSITFFKAQAVQLFVREGSAEIGSSTHHLRIYEYFKKLKSGKIKKSYGMIRVFQNDLHRHIHEDLFSCDLPEQSISMRYADTEVAHAVQTGNSNYLGYLVPGDEIIVDFSHVKLSGNIGTFVEFLNKIGANCAAYNHWVVVGTDTEKVLILKPSMISSEGIDKLYSNCKRNNFDYSSYEKSINEILVGKGWRVSVNVLAKYNAETIRRNALGEVRWTSRSHLPISWSWNTGENRE

SEQ ID NO: 451 - protein, 1258 aa, Gemella haemolysans
MTEENPDIRKVFLAIHHILKNRGHFLLQGQSFKEGNLNNLIKELLNLDILHISIEITEENINKITEIALEKKTLTDKVNDLKKIYPKEKQLLEAFRLIFGGKTSLDKLFAIDEYKELDASVKSVSFKEKIYEEVRHDYEQVLSNYIELLDLAKLVYDSIILSDIKKEGKTLSESKVELYHKHREDLTKLKTLVKNDSKLSEDKKVELYSAIFKEDKDKGTNYVNYIRKSEEGKGCNYEDFKKFLVKELAKLEESSAKEEILRDLELELFLPLQRTKDNSVVPYQIHKEELVKILDNAAKYHKFLNEKDDSGYSIIEKVIQLLEFRIPYYVGPLNSSKKAKVDGFAWSVRNKGYENTPVTPWNYEKVIDESASAEKFITNLTNKCTYLKGEDVLPKSSLLYSEFALLNELNALKYDGNRISLEARNVIIEKLFKEQGKKVTKTSIKNLLKAEGYIDGKGEITGIDITVKNDLKSYRDFKKILGDKFNTEHVENIILWITLYGESRKLIKAKIEAVYGDIYSKEEIAKMSRLVYKDWGRFSRKLLTELVSKKLYNEETGECLNIIGAMRQNNILFMELLADRFDYSQQIIDYNKELQKEVTEITPEILDDLYVSPSVKRSIWQTVRIVEELKKIIGCAPAKIFVETTRSNQDKKKPTDSRKKQLELFYKAVKKDVKDLEKEIGSLNFDKLNERLSSVEPSKLKAKKLYLYYTQLGRCMYSGETIDITQLNTTAYDIDHIYPQSKVKDDSFTNTVLVKREYNAAKTDRYPLGSDIQTPSNRRFWKFLKEKGLITDEKYNRLVRTEEFSDEELTGFIARQLVETSQSVKAVAGILGELNPKTSICYSKAENVSSFRQNFGKIKEGNRKSDNTEQLIKVREINDYHHAKDAYLNVVVGNVYDTKFTRNVFNFIKDKKDGRKYSLNNVFYENVSNSNNVAWELNKTVHQVEKVMNNNNILVTRRTSEQKGGLFDATVYKAKVAAKAKEGVYYPLKTSDPVVNDVTKYGGFTKVKIAYYSIFEYTLVNKKGEEKITRIIPIPIYVSQNIKDDSTLLEFGKTQINIKSGEEVKDFKLKYRKLCIGDLVKINNFFNFIGGKTNDSFVYDGAVQVTLDTESERYIKTLSKYQNWKKENKDGELWESITKEKNTELYNLLVEKMNSGIFIKKKPNKFNELNSEEIRNNFSSISLEEQAKVLLEVLNLLTNKKSIFDLKSINITAARGKISFNLSNLSQFSIIEQSVAGFYEKEITIIGDKENDMENNNC

SEQ ID NO: 452 - protein, 1054 aa, Haemophilus parainfluenzae
MENKNLNYILGLDLGIASVGWAVVEIDEKENPLRLIDVGVRTFERAEVPKTGESLALSRRLARSARRLTQRRVARLKKAKRLLKSENILLSTDERLPHQVWQLRVEGLDHKLERQEWAAVLLHLIKHRGYLSQRKNESKSENKELGALLSGVDNNHKLLQQATYRSPAELAVKKFEVEEGHIRNQQGAYTHTFSRLDLLAEMELLFSRQQHFGNPFASEKLLENLTALLMWQKPALSGEAILKMLGKCTFEDEYKAAKNTYSAERFVWITKLNNLRIQENGLERALNDNERLALMEQPYDKNRLFYSQVRSILKLSDEAIFKGLRYSGEDKKAIETKAVLMEMKAYHQIRKVLEGNNLKAEWAELKANPTLLDEIGTAFSLYKTDEDISAYLAGKLSQPVLNALLENLSFDKFIQLSLKALYKLLPLMQQGLRYDEACREIYGDHYGKKTEENHHFLPQIPADEIRNPVVLRTLTQARKVINGVVRLYGSPARIHIETGREVGKSYKDRRELEKRQEENRKQRENAIKEFKEYFPHFAGEPKAKDILKMRLYKQQNAKCLYSGKPIELHRLLEKGYVEVDHALPFSRTWDDSFNNKVLVLANENQNKGNLTPFEWLDGKHNSERWRAFKALVETSAFPYAKKQRILSQKLDEKGFIERNLNDTRYVARFLCNFIADNMHLTGEGKRKVFASNGQITALLRSRWGLAKSREDNDRHHALDAVVVACSTVAMQQKITRFVRFEAGDVFTGERIDRETGEIIPLHFPTPWQFFKQEVEIRIFSDNPKLELENRLPDRPQANHEFVQPLFVSRMPTRKMTGQGHMETVKSAKRLNEGISVIKMPLTKLKLKDLELMVNREREKDLYDTLKARLEAFNDDPAKAFAEPFIKKGGAIVKSVRVEQIQKSGVLVREGNGVADNASMVRVDVFTKGGKYFLVPIYTWQVAKGILPNKAATQYKDEEDWEVMDNSATFKFSLHPNDLVKLVTKKKTILGYFNGLNRATGNIDIKEHDLDKSKGKQGIFEGVGIKLALSFEKYQVDELGKNIRLCKPSKRQPVR

SEQ ID NO: 453 - protein, 1052 aa, Haemophilus parainfluenzae]
MKNTSLNYVLGLDLGISSVGWAVVEIDEKENPLSLIDVGVRTFERAETQKGESLALARRLARSARRLTQRRVARLKKAKRLLKSENILLSTDECLPHQVWQLRVEGLERKLERQEWAAVLLHLIKHRGYLSQRKNESKSENKELGALLSGVANNHKLLQQTTYRTPAELAVKKFEVEEGHIRNQQGSYTHTFSRLDLLSEMELLFSRQQHFGNPFTSEKLLENLTALLMWQKPALSGDAILKMLGKCTFENEYKAAKHTYSAERFIWITKLNNLRIQENGLERALNDNERLALMKQPYEKAKLTYAQVRSILNLSDEAIFKGLRYSGEDKKTSETKTVLMEMKAYHQIRLALEKNDLKTEWAELKVNSSLLDEIGTAFSLYKTDEDISTCLAGKLSQPVLNALLENLNFDKFIQLSLKALHKILPLMQQGLRYDEACAEIYGDHYGKKTEENHLLLPQIPADEIRNPVVLRTLTQARKVINGVVRLYSSPARIHIETGREVGKSYQDRRELEKRQEENRKQREKAISEIKTLFPNFSGEPKAKDILKMRLYYQQNAKCLYSGKPLELHRLLEQGYVEIDHALPFSRTWDDSFNNKVLVLANENQNKGNLTPFEWLDGKNNSERWKAFKALVETSAFPYTKKQRILSQKLDEKGFIERNLNDTRYVARFLCNFIADNMHLTGEGKRKVFASNGQITALLRGRWGLAKSREDNDRHHALDAVVVACSTVSMQQKITRFVRFEEGNVFTGERIDRETGEIIPLHFPAPWKFFREEVEIRIFSDNPKLELENRLIARPQANHEFVQPLFVSRMPTRKMIGQGHMETIKSAKRLNEGLSVIKMLLTKLRLKDLESMVNREREKELYEALKARLEAFNDEPAKAFAEPFMKKGGAIVKSVRVEQVQKSGVLVRDGNGVADNASMVRVDVFTKGGKYFLVPIYTWQVAKGILPNKAVIQGKNEEDWEVMDDATFRFSLHQNDLVKLVTKKKTIFGYFNGLNRATGNIDIKEHDLEKSKVKDGIHQSIGIKLALSFEKYQVDELGKNIRLCKSSKRQAVR

SEQ ID NO: 454 - protein, 121 aa, Haemophilus pittmaniae
MLNRRYAAKITRFVRFEAGDVFTGERIDRETGEIIPLHFPTPWQFFKQEVEIRIFSDNPKLELENRLPDRPQANHEFVQPLFVSRMPTRKMTGQGHMETVKSAKRLNEGISVIKMPLTKLN

SEQ ID NO: 455 - protein, 203 aa, Haemophilus pittmaniae
MVNREREKDLYDALKARLEAFNDDPAKAFAEPFIKKGGAIVKSVRVEQVQKSGVLVREGNGVADNASMVRVDVFTKDGKYFLVPIYTWQVAKGILPNKAATQYKDEEDWEVMDNSAIFKFSLHPNDLVKLVTKKKTILGYFNGLDRATGNIAIKEHDLEKSKAKGGIHQGVGIKLALSFEKYQIDELGKNIRLCNPSKCQSVR

SEQ ID NO: 456 - protein, 1052 aa, Haemophilus sputorum
MKNTSLNYVLGLDLGISSVGWAVVEIDEKENPLSLIDVGVRTFERAETQKGESLALARRLARSARRLTQRRVARLKKAKRLLKSENILLSTDECLPHQVWQLRVEGLERKLERQEWAAVLLHLIKHRGYLSQRKNESKSENKELGALLSGVANNHKLLQQTTYRTPAELAVKKFEVEEGHIRNQQGSYTHTFSRLDLLSEMELLFSRQQHFGNPFTSEKLLENLTALLMWQKPALSGDAILKMLGKCTFENEYKAAKHTYSAERFIWITKLNNLRIQENGLERALNDNERLALMKQPYEKAKLTYAQVRSILNLSDEAIFKGLRYSGEDKKTSETKTVLMEMKAYHQIRLALEKNDLKTEWAELKVNSSLLDEIGTAFSLYKTDEDISTCLAGKLSQPVLNALLENLNFDKFIQLSLKALHKILPLMQQGLRYDEACAEIYGDHYGKKTEENHLLLPQIPADEIRNPVVLRTLTQARKVINGVVRLYSSPARIHIETGREVGKSYQDRRELEKRQEENRKQREKAISEIKTLFPNFSGEPKAKDILKMRLYYQQNAKCLYSGKPLELHRLLEQGYVEIDHALPFSRTWDDSFNNKVLVLANENQNKGNLTPFEWLDGKNNSERWKAFKALVETSAFPYTKKQRILSQKLDEKGFIERNLNDTRYVARFLCNFIADNMHLTGEGKRKVFASNGQITALLRGRWGLAKSREDNDRHHALDAVVVACSTVSMQQKITRFVRFEEGNVFTGERIDRETGEIIPLHFPAPWKFFREEVEIRIFSDNPKLELENRLIARPQANHEFVQPLFVSRMPTRKMTGQGHMETIKSAKRLNEGLSVIKMLLTKLRLKDLESMVNREREKELYEALKARLEAFNDEPAKAFAEPFMKKGGAIVKSVRVEQVQKSGVLVRDGNGVADNASMVRVDVFTKGGKYFLVPIYTWQVAKGILPNKAVIQGKNEEDWEVMDDATFRFSLHQNDLVKLVTKKKTIFGYFNGLNRATGNIDIKEHDLEKSKVKDGIHQSIGIKLALSFEKYQVDELGKNIRLCKSSKRQAVR

SEQ ID NO: 457 - protein, 1338 aa, Helcococcus kunzii
MQDYYLGLDIGTNSVGWAVTDENYNLLRKKGKDLWGVRLFKEAQPATERRGHRSSRRRTIRKSLRKQLLRELFEEEINAIDKDFFLRLDESKYWLEDKKIEGKYSLFNDENFTDKDYYEKFPTIFHLRKALIESDDKEDIRLYFLAINQMMKRRGHFLIDGKLSNVEDITPFKECIQNLINEELDTEIETEFYDKAIKIVSDYSLKKTEKKNLIKDLVKETDSIEDSKKIINIFNLLISGKSKVNGIFDDEEILEKIKEDNKEDFYLTSEKYEENLEYFSQLLDYRFELISSLKSIYDYIILQEVLKGKKYLSYAQVERYKNHKEDLRKLKQLIKKYDKNGKIYYQIFRDENFKKGYVAYLGYYKKNKKNVPVKKCDYDTFSKNIKSTLDKICDKEDPLYIELIDKIEKGGFLLKQIVSTNSVIPHQVHELELDKILENLEKNYPSFKEISDGVSKIDKIKMIFNFRIPYYVGPLNDYHKDKVNSNTWIVKNEGFENENIRPWNFSKIVDEHACEEEFIKRMINECSYIPGEKVLPKSSLLYSEYMVLNELNNLRVNGDKLNPKIKKEIVENIYKKERKVTLKKIRNFLIINNYVDSKVEFSGLSDGIKANMSSYIDFAEILDDNFDNNMVEDLIEQITIHVGNVKLLTEKISNKYPNLEKKQINKIVNLKFKDWARFSRKLLVGIEGTEKETGEINTIIGFLRETNENFMELMSNRYTFSEEISEIKKKYIPNKLSKQIVDDLYVSPAVKKMIWQVLNINDELIKVLGKQPKKIFIEMARGKEEKPEVKDSRKNKLIELYKNLGKEGKEWLNRIEDKTEADFRNRALYLYYTQMGRCMYTGEIIDIERLYDKELYDLDHIIPRKMKKDDSIHKNLVLVTRNSNQYEKKDNYPVPEVIKSRENVRHLWYALKKKGLITEEKYNRLTRINPLSDKELSEFIERQLVETRQTTKVVKDLFENYYTDSKIVTVKAGLVSELRRDFEVLKCREINDLNHAHDAFLNIIVGDVWSKKFTSNPYNFVKKNREKYTLNNIFTKNQKDLRGNEIWNCAEGKKRIIKTLNKPSVLFSVENFEQTGQLFDQNIIGKQDYKEKTSYVPIKGDERLQDISKYGGYRGISGAYFFIVEHTEKNKRVKTIESLPIYMKSYVEENGLLDFCTNEMKLVDPKIIVKKLNYKSEIIVDGFKYLISGKTENRLSLETNEYLYWNHTQTTDIKKILNINEKIELEKYNGDIESERENIIKYIQIILEKFKLKPFIKRRNLPNIEINFADYETEKLLQLLVNLIPLTTKYVSPVDLTVISGSKYAGKVLIPKKISNLNEVIFISKSITGIYESRRRII

SEQ ID NO: 458 - protein, 1023 aa, Helicobacter cinaedi
MKIYSFDIGVASIGWAFIENEVLQDCGIRIFTKAENPKNGASLALPRREARGVRKRLARRRGRLNTIKQLLCKEFGLQLEDYLSNDGELPKAYTASKANPLKSPYELRTLALSQKLDSKDLVRVILHIAKHRGYGNKHAKDSKDTESGKVKKAIEFNRKTLAEKGYRSVGEYLYREFFQQSRISQNNGATEFINVRNKAGNYEHCVAQDMLKEELESILNAQRQFGFSLKQDFENKLLTKIFEQRPLKSFADKVGNCCFIAGEKRTPKDSLSAIEFIALSRTINTLINLSKESGEIYNRAIILQIVESTLKKGEISYKELREIIRLDERLRFKDPRLDYSREIKEAEKVKFLEFKQLKGFKKALGESFTTLARSQLDEIAEHIALIKDRVKLNEKLESYALTKEQREALSNLSFSAHINLSLQALKQILPFMRGDNGEQCLDYDESVEKAGLKALSKDTLKGQMLPPLNEFEPYLSNPVVARALAEYRKVLNALLKQYGSPHKIHIEYAREAKLSSTERQKYEKEQKDNYAANQAAHKKCQELGLEPSSTNLLKLKLWQEQGGLCLYSGAKITISYLQDPTALQVDHIYPYSRSFDDSYMNKCLVLTKANQEKGNRTPFEAFGTDSAKWGVITTLAQKLPHKKRRRILNTAFNDKEAGFKLRNLNDTSYIARLVADYTETYLEFLPLVESENTTLGKGQKGSKKHIAIVNGALTSTMRYYLGFASKDRDNHLHHALDAVIIGFMNDSVIKAFSDFKKTQETSKAAYYAHTLSKQEYKKQRAFIQLPSGENFRASVLEKVESVFVSKPPRKRVRGALHEATFYSPNDPKLLKNYGGTKGVERALALGKMRKVGAKIVSNGAMVRVDIFRHKSSGKFYGVPVYTMDFALGILPNKAVVVGKDKNGVIKDWLEMDSSYEFIFSLYKDDLLLVQKKEMAEPELCYFMSFNSSIAQISVAKHDNNFSTLTKNQKLLFSNATQEDVSGKSIGIQNLQVFEKWQVSVLGEVKRTQSYPRENISLASKAKK

SEQ ID NO: 459 - protein, 1023 aa, Helicobacter cinaedi
MKIYSFDIGVASIGWAFIENEVLQDCGIRIFTKAENPKNGASLALPRREARGVRKRLARRRGRLNTIKQLLCKEFGLQLEDYLSNDGELPKAYTASKANPLKSPYELRTLALSQKLDSKDLVRVILHIAKHRGYGNKHAKDSKDTESGKVKKAIEFNRKTLAEKGYRSVGEYLYREFFQQSRISQNNGATEFINVRNKAGNYEHCVAQDMLKEELESILNAQRQFGFSLKQDFESKLLTKIFEQRPLKSFADKVGNCCFIAGEKRAPKDSPSAIEFIALSRTINTLINLSKESGEIYNRAIILQIVESTLKKGEISYKELREIIRLDERLRFKDPRLDYSREIKEAEKVKFLEFKQLKGFKKALGESFTTLAISQLDEIAEHIALIKDRVKLNEKLESYALTKEQREALSNLSFSAHINLSLQALKQILPFMRGDNGEQCLDYDESVEKAGLKALSKDTLKGQMLPPLNEFEPYLSNPVVARALAEYRKVLNVLLKQYGSPHKIHIEYAREAKLSSTERQKYEKEQKDNYAANQAAHKKCQELGLEPSSTNLLKLKLWQEQGGLCLYSGAKITISYLQDPTALQVDHIYPYSRSFDDSYMNKCLVLTKANQEKGNRTPFEAFGTDSAKWGVITTLAQKLPHKKRRRILNTAFNDKEAGFKLRNLNDTSYIARLVADYTETYLEFLPLVESENTTLSKGQKGSKKHIAIVNGVLTSTMRYYLGFASKDRDNHLHHALDAVIIGFMNDSVIKAFSDFKKTQETSKAAYYAHTLSKQEYKKQRAFIQLPSGENFRVSVLEKVESVFVSKPPRKRVRGALHEATFYSPNDPKLLKNYGGTKGVERALALGKMRKVGAKIVSNGAMVRVDIFRHKSSGKFYGVPVYTMDFALGILPNKAVVVGKDQNGVIKDWLEMDSSYEFIFSLYKDDVILVQKKEMQRPELCYFVSFDTSGASIKVAKHDNNFSTLTENQKLLFSNATKEEVVGKSIGIQNLKVFEKWQVSVLGEVKRTQSYPRENISLASKAKK

SEQ ID NO: 460 - protein, 344 aa, Helicobacter pullorum
MKILGFDIGIASIGWAFVENGELKDCGVRIFTKAENPKTGDSLAMPRREARSVRRRLARRKGRLETLKRLLAKEWDLCYEDYIAADGELPKAFMGKNLTNPYVLRYEALQRLLSKEELVRVVLHIAKHRGYGNKNAKITKSEESKREQGKILSALATNASVIARYRTVGEYFYKEFCEVIKNPQGLNTNENCTQPKVRVLKPIRNKGGEYTNCILQEDLQRELRCIFEHQKGFGFSITQEFQDKILKIAFYQRSLKDFSHLVGKCTFYPDEPRAPKFSLSAIEFITKAKAINLLASIAKESGEVWDKEQWRERLDSVFSAVCERGINTIPSSSHFLNIFDILYL

SEQ ID NO: 461 - protein, 1688 aa, Ignavibacterium album
MEFKKVLGLDIGTNSIGCALLSLPKSIQDYGKGGRLEWLTSRVIPLDADYMKAFIDGKNGLPQVITPAGKRRQKRGSRRLKHRYKLRRSRLIRVFKTLNWLPEDFPLDNPKRIKETISTEGKFSFRISDYVPISDESYREFYREFGYPENEIEQVIEEINFRRKTKGKNKNPMIKLLPEDWVVYYLRKKALIKPTTKEELIRIIYLFNQRRGFKSSRKDLTETAILDYDEFAKRLAEKEKYSAENYETKFVSITKVKEVVELKTDGRKGKKRFKVILEDSRIEPYEIERKEKPDWEGKEYTFLVTQKLEKGKFKQNKPDLPKEEDWALCTTALDNRMGSKHPGEFFFDELLKAFKEKRGYKIRQYPVNRWRYKKELEFIWTKQCQLNPELNNLNINKEILRKLATVLYPSQSKFFGPKIKEFENSDVLHIISEDIIYYQRDLKSQKSLISECRYEKRKGIDGEIYGLKCIPKSSPLYQEFRIWQDIHNIKVIRKESEVNGKKKINIDETQLYINENIKEKLFELFNSKDSLSEKDILELISLNIINSGIKISKKEEETTHRINLFANRKELKGNETKSRYRKVFKKLGFDGEYILNHPSKLNRLWHSDYSNDYADKEKTEKSILSSLGWKNRNGKWEKSKNYDVFNLPLEVAKAIANLPPLKKEYGSYSALAIRKMLVVMRDGKYWQHPDQIAKDQENTSLMLFDKNLIQLTNNQRKVLNKYLLTLAEVQKRSTLIKQKLNEIEHNPYKLELVSDQDLEKQVLKSFLEKKNESDYLKGLKTYQAGYLIYGKHSEKDVPIVNSPDELGEYIRKKLPNNSLRNPIVEQVIRETIFIVRDVWKSFGIIDEIHIELGRELKNNSEERKKTSESQEKNFQEKERARKLLKELLNSSNFEHYDENGNKIFSSFTVNPNPDSPLDIEKFRIWKNQSGLTDEELNKKLKDEKIPTEIEVKKYILWLTQKCRSPYTGKIIPLSKLFDSNVYEIEHIIPRSKMKNDSTNNLVICELGVNKAKGDRLAANFISESNGKCKFGEVEYTLLKYGDYLQYCKDTFKYQKAKYKNLLATEPPEDFIERQINDTRYIGRKLAELLTPVVKDSKNIIFTIGSITSELKITWGLNGVWKDILRPRFKRLESIINKKLIFQDEDDPNKYHFDLSINPQLDKEGLKRLDHRHHALDATIIAATTREHVRYLNSLNAADNDEEKREYFLSLCNHKIRDFKLPWENFTSEVKSKLLSCVVSYKESKPILSDPFNKYLKWEYKNGKWQKVFAIQIKNDRWKAVRRSMFKEPIGTVWIKKIKEVSLKEAIKIQAIWEEVKNDPVRKKKEKYIYDDYAQKVIAKIVQELGLSSSMRKQDDEKLNKFINEAKVSAGVNKNLNTTNKTIYNLEGRFYEKIKVAEYVLYKAKRMPLNKKEYIEKLSLQKMFNDLPNFILEKSILDNYPEILKELESDNKYIIEPHKKNNPVNRLLLEHILEYHNNPKEAFSTEGLEKLNKKAINKIGKPIKYITRLDGDINEEEIFRGAVFETDKGSNVYFVMYENNQTKDREFLKPNPSISVLKAIEHKNKIDFFAPNRLGFSRIILSPGDLVYVPTNDQYVLIKDNSSNETIINWDDNEFISNRIYQVKKFTGNSCYFLKNDIASLILSYSASNGVGEFGSQNISEYSVDDPPIRIKDVCIKIRVDRLGNVRPL

SEQ ID NO: 462 - protein, 1354 aa, Indibacter alkaliphilus
MKKILGLDLGTTSIGWAFIKEPEKDVVGSEIVDMGVRIVPLSSDEENDFAKGNTISINADRTLKRGARRNLQRFKQRRNALLETFKEKNLIPSNFQYAEDGPSSTFSTLKLRDKAAKEKIELDDFVKVLLQINKKRGYKSSRKAMSEEDEGTAIDSMGIAKELYENDLTPGQWVYEALKNGRKNVPDFYRSDLQEEFKKIVNYQSEFYPDILNTSFVEDWMGKASTPTKQYFNKRGVQLAENKGKREERRLQEYKWRAEAVNFKIDLSEIALILSQINSQISNSSGYLGAISDRSKELYFKNLTVGQYLYQQVKKNPHTRLKGQVFYRQDYLDEFEKIWSVQSSFYPQLNDELKQEVRDVTIFFQRRLKSQKHLISNCEFEEHHKVVPKSHPIFQEFRIWQNLNNLTLIKKDNLNEKCELALEDKTALANELAFKKELSVKDALKVLGLKPSDWEFNFTKIEGNRTNHAFFEAFAKIIELEDGEPIDLGNLKADDILDQFSEAFLRIGIDTELLQVNSDIEGAEYEKQSYIQFWHLLYSSEDDQKLKQNLIRKFGFKPEHAKILASISLQDDHASLSSRAIKKILPHLQSGLIYDKACTYAGYNHSSSFTKDENEKRELRAELELLKKNSLRNPVVEKILNQMINVVNAILKDPNLGRPDEIRVEMARELKANAEQRKNMTSNIASATRDHEKYREILKKEFGLKRVTKNDLLRYKLWLETDGISLYTGKPIEASKLFSKEYDIEHIIPKARLFDDSFSNKTICERQLNIDKANVTAFSFLQNKLSADEFEQYQSRVKSLYGKLSKAKIQKLLMANDKIPEDFIARQLQETRYISKKAKEILFEITMRVSVTTGTITDKLREDWGLVEIMKELNWEKYDKLGLTYTIEGKHGERLNKIKDWNKRNDHRHHAMDALTVALTKPAYIQYLNNLNAKAIGNKKGTEIFAIEQKYLKRENGKLCFIPPIENIRAEAKKHLSKILVSYKAKNKVVTINKNKTKKKAGFNEQTALTPRGQLHKETVYGKSFHYSTKFEKIGASFDAQKINTVAKKEEREALLKRLAENGNDPKKAFTGKNSLNKMPIYLDLGKNIKLSEKVKTVVLEQNYTIRKNIDPDLKVDKVIDVGIKRILESRLEEFGGNAKLAFSNLEENPIWLNKEKGIPIKRVKISGVSNVESLHVKKDHFGEKILDEEGNEIPVDFVSTGNNHHVAIYEDEDGNLQDEVVNFYEAVIRRNQGESIIKYRHEEGWNFLYSIKQNEFFVFPSQDFNPNDFDLLDPKNYDLISPNLYRAQKFSKVMYGNSAVRDYVFRHHLETVLNDVKELKDVAYKQLKSLQYLNGIKKVRLNHLGQIIQVGEY

SEQ ID NO: 463 - protein, 1397 aa, Joostella marina
MKKVLGLDLGTNSIGWALVNEATKEEKKEGKSSEIIKLGVRVNPLTVDEKTNFEKGRPLSTNADRTLKRSARRNLQRYKLRRRNLIEILIKNGFITKDTPLTETGKDTTHQTLKLRAKSAKEKVDLKDFAKILLTINKKRGYKSSRKVNSDEDGLAIDGMAVAKHLYEQNLTPGQYVLNLLQKNKKYVPDFYRSDLQEEFKNIWNNQKTYYFDILTDTLFEELKDKNKSQTWAICKKPFDIAGIKQIGKASDKRLERYKWRTEGLTQKLNLEYLAIALQEINNDINKSSGYLGAISDRSKELFFNKETVGENLYRQLVKTPHTSLRNQVFYRQDYLDEFETIWETQAKFYPQLTHTLKEEIRDVIIFYQRKLKSQKSLISFCQFESWEQTYIEKETGKSKTRTVGRKVIPKSSPLFQEFKIWQNLNSLEFRNSDEGEIIEFIKLDEDIRQTVFEELNLRGNLKPNDVLKILGNYISLGKVSQWKCNFEEIEGNRTNAALYNVYQIIAENEGYGFDWAKKTASEINKELKNIFPQLGIDASILDFDFTQANFDKQTSYQLWHLLYSAEEDFKISEEDKVLYGNSSVSLKKKLHQKYGFKPEYTKLLTNISLQPDYGNLSAKAICNILPYLKENNVYSEACDLTGYNHSNFLTAEEQAKRPLKPILELLKKNSLRNPVVEKILNQMVNVVNQVIETYGKPDEIRIELTRELKKSAKERANMTKSIADATRRNDDYRKTIIKEFGIPNPTKSDVVRYRLWQELASRGYKDIFTDTEIKPQELFSNKIDIEHIIPKALLFDDSFSNKTLAFKKDNLKKANRTAYDFIANDYAPNLENYIERVESLHKDRKITRAKRNKLLMLQSKLPDGFIERDLRNSQYITKEAKKMLYEVCRTVVSTSGSITDKLREDWDLINVMKELNFPKYKALGLTEKIERYDIGAEKMKEVEIIEDWNKRNDHRHHAIDALTVAFSTHSHIQYLNHLNARRDEGHKKHAAIIAIESTITEKEGNKKRRFIAPLPNFRLQAKEHIESILVSFKNKNKVVTNNINKTKRIKKDKFNTKVQLTPRGQLHKETIYGKIKQPLEKHIKLNKSFTLEQAKLIIDKRQREKVLNHLEKYAHNSDIAFNSKTLKKNPLLISDEPLKEVLCFEEVFTIRKDISYDNFKNEKQLDKVIDEKVKQALKERINQYNGDFREAFSDIERNPIWLNKAKGICVKRATIKGVSNAEPLHTAKNHLGEEVLTENKEQIPVDYVSTGNNHHVAIYEDEDGNLQEKVVSFYEAVIRVNEGLPIIDKEYNKSLGWTFKFTMKQNEMFVFPSEDFNPTEIDLLDQKNASLISPNLFRVQKFTIKDYFFRHHLETTVENNNTLKNTTWRREGLSGIYGIIKIRLNHLGEIVQVGEY

SEQ ID NO: 464 - protein, 1060 aa, Kingella kingae
MAAKSLNYILGLDLGIASCGWAVVEMDEQENPLRLIDVGVRTFEEAENPKDGSSLAETRRLARAQRRLISRRANRMNKLCRLLKQENVLQANDYDEKGLIIGLPNQAWELRAQGLDRKLEPKEWAAVLIHLVKHRGYLSQRKNESQTADKELGALLSGMNHNHQLLQSQSNQYRTPAELAIKQFATQDGHIRNQRGAYTHTFNRLDLQNELNQLFDAQTRLGNPHVSGSLKTAINDLLMNQKAALSGDAILEMLGRCTFEPSEYKAAKNTYSAERFVWLGKLTNLRIQDNGLESALSREQRELLLNEPYNKTKLTYQQVRKLLRLPETAFFKGLRYGKDNAESATFMEMKSYHAIRKSLENKSLKSEWEKLKTQPKLLDLIGTAFSIYKTDDEIAGCLKNQLPENVIIALQGQLNFSNFMELSLKALEKLLPLMEQGLRYDEACTQIYGNRHEKIADKTEKFLPNIPADKLRNPVVLRTLTQARKVINAIIRRYGSPARVHIETGREVGKSFSDRDKLKKQQEENQEQRRRAIDEWKQFFPNAAHEPKAVDILKLRLYQLQQGKCLYSGLPIDVRRLPEKGYVEIDHALPFSRTWDDSFNNKILVLASENQNKGNQTPYEYLRGADNSESWRLFVENVQNCQFSPNKKQKIMAKQLDEKGFLERNLNDTRYVSRFLCQFISEHLHLTGKGKKRVFASNGQITALLRGRWGLSKNREENDRHHAVDAVVVACSTVAMQQKITQFVRYQKGNVFTGERIDKETGEVISIHFPTPWEHFREEVMIRVFDDNPLRTLPEKLPNRPEALHEYVMPLFVSRMPTRKMTGQGHKETIKSAKRLDEKISVLRVPLTQLKLNDLENMVNREREPALYEALKARLEQFKNDPAKAFAEPFFKQGGQQVKAVRVEIVQKSGMLLRKINGVADNGSMVRVDVFEKSGKFYLVPIYAWQVAEGILPNYAVVAHKDESDWILMDESYHFKFALYKNDLLEVQTKKGGIMGYFASLDRATGAITIREHDRDKKKCKDGEHRSIGVKMASSFKKLQVDELGKNIHETRSRKRPNIG

SEQ ID NO: 465 - protein, 1314 aa, Lactobacillus animalis
MLKKDYSIGLDIGTNSVGHAVVTDDYKVPTKKMKVFGDTSKKTIKKNMLGVLLFNEGQTAADTRLKRGTRRRYTRRKNRLRYLQEIFAPELAKVDPNFLYRLEESSLVAEDKKYDVYPIFGKREEELLYHDTYKTIYHLRSALANNDQPADLRLVYLALAHIIKYRGNFLLEGEIDLRTTDINKVFAEFSETLNENSDENLGKLDVADIFKNNTFSKTKKSEELLKLSGAKKNQLAHQLFKMMVGNMGSFKKVLGTDEEHKLSFGKDTYEDDLNDLLAEAGDQYLDIFVAAKKVYDAAILASILDVKDTQTKTVFSQAMIERYEEHQKDLIELKRVFKKYLPEKCHDFFSEPKISGYAGYIDGKVSEEDFYKYTKKTLKGIPETEEILQKIDANNYLRKQRTFDNGAIPHQVHLKELVAIVENQGKYYPFLRENKDKFEKILNFRIPYYVGPLARGNSKFAWLTRAGEGKITPYNFDEMIDKETSAEDFIKHMTINDLYLPTEPVLPKHSLLYERYTIFNELAGVRYVTENGEAKYFDAQTKRSIFELFKLDRKVSEKMVIKHLKVVMPAIRIQALKGLDNGKFNASYGTYKDLVDMGVAPELLNDEVNSEKWEDIIKTLTIFEGRKLIKRRLENYRDFLGEDILRKLSRKKYTGWGRLSAKLLDGIYDKKTHKTILDCLMTEDYSQNFMQLINDDNYSFKETIKNAQVIEKEETLAKTVQELPGSPAIKKGILQSLEIVDEIIKVMGYKPKSIVVEMARETQKTHGTRKREDRVQQIVENLKDANELPEKLPSNAELSDERKYLYCLQNGRDMYTGAPLDYDHLQFYDVDHIIPQSFLKDDSIENKVLTIKKENVRKTNGLPSEAVIQKMGSFWKKLLDAGAMTNKKYDNLRRNLHGGLNEKLKERFIERQLVETRQITKYVAQLLDQRLNYDGNGVELDEKIAIVTLKAQLASQFRSEFKLRKVRALNNLHHAHDAYLNAIVANLIMAKYPELEPEFVYGKYRKAKFKGLGKATAKNTLYANVLYFLKENEVYPFWDKARDLPTIKRYLYRAQVNKVRKAERQIGGFSDEMLVPKSDSGKLLPRKEGLDPVKYGGYAKAVESYAVLITADEVKKGKTKKVKTLVNIPIIDSKKYEADPTAYLASRGYTNVTNSFILPKYSLLEDPEGRRRYLASFKEFQKANELILPQHLVELLYWVNAKDGEQKLEDHKAEFKELFDKIMEFADKYVVAPKNSEKIRRLYEENQDATPMELGKNFVELLRYTADGAASDFKFFGENIPRKRYNSAGSLLNGTLIYQSKTGLYETRIDLGKL

SEQ ID NO: 466 - protein, 1371 aa, Lactobacillus buchneri
MKVNNYHIGLDIGTSSIGWVAIGKDGKPLRVKGKTAIGARLFQEGNPAADRRMFRTTRRRLSRRKWRLKLLEEIFDPYITPVDSTFFARLKQSNLSPKDSRKEFKGSMLFPDLTDMQYHKNYPTIYHLRHALMTQDKKFDIRMVYLAIHHIVKYRGNFLNSTPVDSFKASKVDFVDQFKKLNELYAAINPEESFKINLANSEDIGHQFLDPSIRKFDKKKQIPKIVPVMMNDKVTDRLNGKIASEIIHAILGYKAKLDVVLQCTPVDSKPWALKFDDEDIDAKLEKILPEMDENQQSIVAILQNLYSQVTLNQIVPNGMSLSESMIEKYNDHHDHLKLYKKLIDQLADPKKKAVLKKAYSQYVGDDGKVIEQAEFWSSVKKNLDDSELSKQIMDLIDAEKFMPKQRTSQNGVIPHQLHQRELDEIIEHQSKYYPWLVEINPNKHDLHLAKYKIEQLVAFRVPYYVGPMITPKDQAESAETVFSWMERKGTETGQITPWNFDEKVDRKASANRFIKRMTTKDTYLIGEDVLPDESLLYEKFKVLNELNMVRVNGKLLKVADKQAIFQDLFENYKHVSVKKLQNYIKAKTGLPSDPEISGLSDPEHFNNSLGTYNDFKKLFGSKVDEPDLQDDFEKIVEWSTVFEDKKILREKLNEITWLSDQQKDVLESSRYQGWGRLSKKLLTGIVNDQGERIIDKLWNTNKNFMQIQSDDDFAKRIHEANADQMQAVDVEDVLADAYTSPQNKKAIRQVVKVVDDIQKAMGGVAPKYISIEFTRSEDRNPRRTISRQRQLENTLKDTAKSLAKSINPELLSELDNAAKSKKGLTDRLYLYFTQLGKDIYTGEPINIDELNKYDIDHILPQAFIKDNSLDNRVLVLTAVNNGKSDNVPLRMFGAKMGHFWKQLAEAGLISKRKLKNLQTDPDTISKYAMHGFIRRQLVETSQVIKLVANILGDKYRNDDTKIIEITARMNHQMRDEFGFIKNREINDYHHAFDAYLTAFLGRYLYHRYIKLRPYFVYGDFKKFREDKVTMRNFNFLHDLTDDTQEKIADAETGEVIWDRENSIQQLKDVYHYKFMLISHEVYTLRGAMFNQTVYPASDAGKRKLIPVKADRPVNVYGGYSGSADAYMAIVRIHNKKGDKYRVVGVPMRALDRLDAAKNVSDADFDRALKDVLAPQLTKTKKSRKTGEITQVIEDFEIVLGKVMYRQLMIDGDKKFMLGSSTYQYNAKQLVLSDQSVKTLASKGRLDPLQESMDYNNVYTEILDKVNQYFSLYDMNKFRHKLNLGFSKFISFPNHNVLDGNTKVSSGKREILQEILNGLHANPTFGNLKDVGITTPFGQLQQPNGILLSDETKIRYQSPTGLFERTVSLKDL

SEQ ID NO: 467 - protein, 315 aa, Lactobacillus casei
MFKDYLKQLEDDGTAKAIRQLYDRYIDGDDAKPFVREDFVKALTKEVTAHPNAKSPELLERLAQPDFMLKQRNKANGAIPVQMQQRELDQIIKNQSVYYDWLAAPNPVEKHRKSMPYQLDELLNFRIPYYVGPLVTAKEQKAARGGVFAWMVRKDPDGNITPYNFDEKVDREASANTFIQRMKTTDTYLIGEDVLPKQSLLYQSYEVLNELNNVRVNDNKLSFDQKQQVLGELFERHNTVTIKQFVDNLLAHGDYDRIPEVRGLADEKRFLSSLSTYNQLKGILHEAIDDSDKQTDMVDCKINPNAVRTKKISFL

SEQ ID NO: 468 - protein, 236 aa, Lactobacillus casei
MFKDYLKQLEDDGTAKAIRQLYDRYIDGDDAKPFVREDFVKALTKEVTAHPNAKSPELLERLAQPDFMLKQRNKANGAIPVQMQQRELDQIIKNQSVYYDWLAAPNPVEKHRKSMPYQLDELLNFRIPYYVGPLVTAKEQKAARGGVFAWMVRKDPDGNITPYNFDEKVDREASANTFIQRMKTTDTYLIGEDVLPKQSLLYQSYEVLNELNNVRVNDNKLSSSIFKSSATMITNS

SEQ ID NO: 469 - protein, 1389 aa, Lactobacillus casei
MIIRTYELKTITTIAILKMFQLLTGGLSMTKLGKPYGIGVDIGSNSIGFAAVDENSHLIRLKGKTVIGARLFEEGKAAADRRASRTTRRRLSRNRWRLSFLRDFFESHITPTGPNFFMRQKYSEISPKDKARYKYEKRLFNDRTDAEFYQQYPTMYHLRNRLLTDPSKADVREIYFAIHHILKSRGHFLTSGYAKDFNTNKVALNEIFPALQDAYAQVYPDLDITFDENKVNEFKTVLLNEKATPSDTQRALVNLLLAEDGDKDILKQQKQVLTEFAKAVVGLKTKLNVALGTEVDSSEATVWNFSLGQLDDKWAGIESAMTDEGTEILDQIRDLYRARLLNGIVPAGKTLSQAKVDDYAQHHEDLELFKDYLKQLEDDGTAKAIRQLYDRYIDGDDAKPFVREDFVKALTKEVTAHPNAKSPELLERLAQPDFMLKQRNKANGAIPVQMQQRELDQIIKNQSVYYDWLAAPNPVEKHRKSMPYQLDELLNFRIPYYVGPLVTAKEQKAAQGGVFAWMVRKDPDGNITPYNFDEKVDREASANTFIQRMKTTDTYLIGEDVLPKQSLLYQRYEVLNELNNVRVNNEKLSIEQKQQVIRELFERHNSVTIKQFAENLRAHGDYAHIPEIRGLADEKRFLSSLSTYRQLKSLLPDAIDDPAKQADIENIIAWSTVFEDAAIFKTKLKEINWLDSQTITKLSNIRYRGWGQFSHKFLNGLTLGNGHTIIQELFLSNNNLMQILTDETLQKKMTELNADKLKAANINDAIDDAYTSPSNKKALRQVLRVIEDIKRAADGQDPSWLYVETADGGGTPGKRTRARQHQLQEIYANAAHELIDSAVRGELEDKIADKADFNDRLVLYFMQGGRDIYTGTPLNIDQLSSYDIDHILPQSLIKDNSLDNRVLVHAIINREKNATFASTIYAQKMNATWRQWHEAGLISGRKLRNLQMRPDQIDKYASGFVARQLVETRQIIKLTEQIVAAQYPETKIIAVKAGLSHQLREELEFPKNRDVNHYHHAFDAFLAARIGTYLLKRFPNLQAFFTYGKFKKADVKKLRGFNFIRDITHAEDKIVVKDTGEVIWDKKRDVDELDRIYNFKRMLITHEVHFEKADLFKQTVYGAKDSKEAGGKKQLISKKKGYPVDIYGGYTQETGSYLSVVRLTKKAMYAVVKVSTRDAAKLAVAKSISEQKENETLNDIIDEKLSKISKNGKITHELFEVVLPRVGQKTLFKNSKYNLFLVNSDTYMHNYQELWMPREYQKMWKDISLSKYGDAQTEDQLDQIFGFIVSQVNSYFNLYDINQFRKKLNDAADKFATLPMRDTDDMQGKIATIGQLLIGLQANAARSDLRNLDIKTPLGLLQIPNGISLDSDTSVVYQSPTGLLEREVHLSDL

SEQ ID NO: 470 - protein, 412 aa, Lactobacillus casei
MIKDNSLDNRVLVHPLVNREKDTIFASTRFAKQTNGMWRQWHAAGLISSRKLRNLQMRPDEIDKYASGFVARQLVETRQIIKLTEQIVADQYPDTKIIAVKAGLSSQLRKELDFPKNREVNHYHHAFDAFLAARIGTYLLKRYPNLEPFFTYGKFKKTEVKKLKSFNFIRDMTHAKDKIVAKETGEIVWDNASDINELDRIYNFKRMLITHEVRFETASLFKQTLYAAKNPKNRGGSRQLIPKKKGYLVDIYGGYTQETGSYLSVVRLTKKAMYAVVKVSTRDAAKLAVAKSISEQKENETLKKIIDGKLSKTSKKGKTTHQLFEIVLPRVGQKTLFKNSKYNQFLVNSDTYMHNYQELWMPREYQRMWKDILLSNHGDAQIEGQLDQIFKFIVSQVNSYFNLYDINQFRKK

SEQ ID NO: 471 - protein, 234 aa, Lactobacillus casei
MKVTKKTETIFKVVKIATSQVAALNKARSRSTAEELSVLTELLKPKFSKVGKNGKITDTPFEVVLPRVPREQLFYNAKYGFFMVNSDTMFHNFQEIWVSRSDQKILQQIRKAKIDYPNVDQDLDNLFHNLADQIVKYFDLYSIAGFKEKISQSQNTFNDLAVDDTDQSVGKITVINELLKGAQANGMTGSLKVLKISTPFGFTQDKSGVLTKDSSIIYQSPTGLFERSVRLTDL

SEQ ID NO: 472 - protein, 566 aa, Lactobacillus casei
MQILTDEVLKQKIAELNAHELKASGIYAAIDDAYTSPSNKKALRQVLSVIDDITNAAGQAPNWLYIETADGDGVPGKRTNSRQRKIQEIYVNAAQELITSSVRGELEDKIASRADFTDRLVLYFMQGGRDIYTGEPLNIDNLSSYDIDHILPQSLIKDNSLDNRVLVHPLVNREKDTIFASTRFAKQMNGMWRQWHAAGLISSRKLRNLQMRPDEIDKYASGFVARQLVETRQIIKLTEQIVADQYPDAKIIAVKAGLSSQLRKELDFPKNREVNHYHHAFDAFLAARIGTYLLKRYPNLEPFFTYGKFKKTEVKKLKSFNFIRDMTHAKDKIVAKETGEIVWDNASDINELDRIYNFKRMLITHEVRFETASLFKQTLYAAKNSKNRGGSRQLIPKKKGYLVDIYGGYTQETGSYLSVVRLTKKAMYAVVKVSTRDAAKLAVAKSISEQKENETLKKIIDGKLSKTSKKGKTTHQLFEIVLPRVGQKTLFKNSKYNQFLVNSDTYMHNYQELWMPREYQRMWKDILLSNHGDAQLEGQLDQIFKFIVSQVNSYFNLYDINQFRKK

SEQ ID NO: 473 - protein, 1363 aa, Lactobacillus casei
MTKLGKPYGIGVDIGSNSIGFAAVDENSHLIRLKGKTVIGARLFEEGKAAADRRASRTTRRRLSRNRWRLSFLRDFFESHITPTDPNFFMRQKYSEISPKDKARYKYEKRLFNDRTDAEFYQQYPTMYHLRNRLLTDPSKADVREIYFAIHHILKSRGHFLTSGYAKDFNTNKVALNEIFPALQDAYAQVYPDLDITFDENKVNEFKTVLLDEKATPSDTQRALVNLLLAEDGDKDILKQQKQVLTEFAKAVVGLKMKLNVALGTEVDSSEATAWNFSLGQLDDKWAGIESAMTDEGTEILDQIRDLYRARLLNGIVPAGKTLSQAKVDDYEQHHEDLELFKDYLKQLEDDGMAKVIRQLYDRYIDGDDAKPFVREDFVKALTKEVTAHPNAKSPELLERLVQPDFMLKQRNKANGAIPVQMQQRELDQIIKNQSVYYDWLAAPNPVEKHRQSMPYQLDELLNFRIPYYVGPLVTAKEQKAAQGGVFAWMVRKDPDGNITPYNFDEKVDREASANTFIQRMKTTDTYLIGEDVLPKQSLLYQSYEVLNELNNVRVNDNKLSFDQKQQVLGELFERHNTVTIKQFVDNLLAHGDYDRIPEVRGLADEKRFLSSLSTYNQLKGILHEAIDDSDKQTDIEKIIAWSTIFEDKAIFKTKLNEISWLTAGMINSLANIRYRGWGQFSHKLLNELTLSTGRTVFEELLISSHNLMQILTDEVLKQKIAELNAHELKASGIYAAIDDAYTSPSNKKALRQVLSVIDDITNAAGQAPNWLYIETADGDGVPGKRTNSRQRKIQEIYANAAQELITGSVRGELEDKIASRADFTDRLVLYFMQGGRDIYTGEPLNIDNLSSYDIDHILPQSLIKDNSLDNRVLVHPLVNREKDTIFASTRFAKQMNGMWRQWHAAGLISSRKLRNLQMRPDEIDKYASGFVARQLVETRQIIKLTEQIVADQYPDAKIIAVKAGLSSQLRKELDFPKNREVNHYHHAFDAFLAARIGTYLLKRYPNLEPFFTYGKFKKTEVKKLKSLKSFNFIRDMTHAKDKIVAKETGEIVWDNASDINELDRIYNFKRMLITHEVRFETASLFKQTLYAAKNSKNRGGSRQLIPKKKGYLVDIYGGYTQETGSYLSVVRLTKKAMYAVVKVSTRDAAKLAVAKSISEQKENETLKKIIDGKLSKTSKKGKTTHQLFEIVLPRVGQKTLFKNSKYNQFLVNSDTYMHNYQELWMPREYQRMWKDILLSNHGDAQLEGQLDQIFKFIVSQVNSYFNLYDINQFRKKIADATDKFAKLPTHDTDNARGKIATIGQLLIGLQANAMRSDLRNLDIKTPFGLLQIGTGITLDLDTSIIYQSPTGLFEREVPLTDL

SEQ ID NO: 474 - protein, 1360 aa, Lactobacillus casei
MTKLGKPYGIGVDIGSNSIGFAAVDENSHLIRLKGKTVIGARLFEEGKAAADRRASRTTRRRLSRNRWRLSFLRDFFESHITPTDPNFFMRQKYSEISPKDKARYKYEKRLFNDRTDAEFYQQYPTMYHLRTRLLTDPSKADVREIYFAIHHILKSRGHFLTPGYAKDFNTNKVALNEIFPALQDAYAQVYPDLDITFDENKVNEFKTVLLNEKATPSDTQRALVNLLLAEDGDKDILKQQKQVLTEFAKAVVGLKTKLNVALGTEVDSSEATVWNFSLGQLDDKWAGIESAMTDEGTEILDQIRDLYRARLLNGIVPAGKTLSQAKVDDYAQHHEDLELFKDYLKQLEDDGTAKAIRQLYDRYIDGDDAKPFVREDFVKALTKEVTAHPNAKSPELLERLAQPDFMLKQRNKANGAIPVQMQQRELDQIIKNQSVYYDWLAAPNPVEKHRKSMPYQLDELLNFRIPYYVGPLVTAKEQKAAQGGVFAWMVRKDPDGNITPYNFDEKVDREASANTFIQRMKTTDTYLIGEDVLPKQSLLYQSYEVLNELNNVRVNDNKLSFDQKQQVLGELFERHNTVTIKQFVDNLLAHGDYDRIPEVRGLADEKRFLSSLSTYNQLKGILHEAIDDADKQTDIENIIAWSTIFEDKAIFKTKLNEISWLNAGMINSLANIRYRGWGQFSHKLLNELTLSTGRTVFEELLISSRNLMQILTDEVLKQKIAELNAHELKASGIYAAIDDAYTSPSNKKALRQVLSVIDDITNAAGQAPNWLYIETADGDGVPGKRTNSRQRKIQEIYANAAQELITGSVRGELEDKIASRADFTDRLVLYFMQGGRDIYTGEPLNIDNLSSYDIDHILPQSLIKDNSLDNRVLVHPLVNREKDTIFASTRFAKQMNGMWRQWHAAGLISSRKLRNLQMRPDEIDKYASGFVARQLVETRQIIKLTEQIVADQYPDTKIIAVKAGLSSQLRKELDFPKNREVNHYHHAFDAFLAARIGTYLLKRYPNLEPFFTYGKFKKTEVKKLKSFNFIRDMTHAKDKIVAKETGEIVWDNASDINELDRIYNFKRMLITHEVRFETASLFKQTLYAAKNSKNRGGSRQLIPKKKGYLVDIYGGYTQETGSYLSVVRLTKKAMYAVVKVSTRDAAKLAVAKSISEQKENETLKKIIDGKLSKTSKKGKTTHQLFEIVLPRVGQKTLFKNSKYNQFLVNSDTYMHNYQELWMPREYQRMWKDILLSNHGDAQLEGQLDQIFKFIVSQVNSYFNLYDINQFRKKIADATDKFAKLPTHDTDNARGKIATIGQLLIGLQANAMRSDLRNLDIKTPFGLLQIGTGITLDLDTSIIYQSPTGLFEREVPLTDL

SEQ ID NO: 475 - protein, 700 aa, Lactobacillus casei
MTKLGKPYGIGVDIGSNSIGFAAVDENSHLIRLKGKTVIGARLFEEGKAAADRRASRTTRRRLSRNRWRLSFLRDFFESHITPTDPNFFMRQKYSEISPKDKARYKYEKRLFNDRTDAEFYQQYPTMYHLRTRLLTDPSKADVREIYFAIHHILKSRGHFLTSGYAKDFNTNKVALNEIFPALQDAYAQVYPDLDITFDENKVNEFKTVLLDEKATPSDTQRALVNLLLAEDGDKDILKQQKQVLTEFAKAVVGLKTKLNVALGTEVDSSEATAWNFSLGQLDDKWAGIESAMTDEGTEILDQIRDLYRARLLNGIVPAGKTLSQAKVDDYEQHHEDLELFKDYLKQLEDDGMAKAIRQLYDRYIDGDDAKPFVREDFVKALTKEVTAHPNAKSPELLERLVQPDFMLKQRNKANGAIPVQMQQRELDQIIKNQSVYYDWLAAPNPVEKHRQSMPYQLDELLNFRIPYYVGPLVTAKEQKAAQGGVFAWMVRKDPDGNITPYNFDEKVDREASANTFIQRMKTTDTYLIGEDVLPKQSLLYQSYEVLNELNNVRVNDNKLSFDQKQQVLGELFERHNTVTIKQFVDNLLAHGDYDRIPEVRGLADEKRFLSSLSTYNQLKGILHEAIDDSDKQTDIEKIIAWSTIFEDKAIFKTKLNEISWLNAGMINSLANIRYRGWGQFSHKLLNELTLSTGRTVFEA

SEQ ID NO: 476 - protein, 330 aa, Lactobacillus casei
MTKLGKPYGIGVDIGSNSIGFAAVDENSHLIRLKGKTVIGARLFEEGKAAADRRASRTTRRRLSRNRWRLSFLRDFFESHITPTDPNFFMRQKYSEISPKDKNRYKYEKRLFNDRTDAEFYQQYPTMYHLRNRLLTDPSKADVREIYFAIHHILKSRGHFLTPGDAKDFNTNKVALNEIFPALQDAYAQVYPDLDITFDENKMNEFKTVLLNEKATPSDTQRALVNLLLAEDGDKDILKQQKQVLTEFAKAVVGLKTKLNVALGTEVDSSEATAWNFSLGQLDDKWAGIESAMTDEGTEILDQIRDLYRARLLNGIVPAGKTLSQAKVDD

SEQ ID NO: 477 - protein, 330 aa, Lactobacillus casei
MTKLGKPYGIGVDIGSNSIGFAAVDENSHLIRLKGKTVIGARLFEEGKAAADRRASRTTRRRLSRNRWRLSFLRDFFESHITPTDPNFFMRQKYSEISPKDKNRYKYEKRLFNDRTDAEFYQQYPTMYHLRNRLLTDPSKADVREIYFAIHHILKSRGHFLTPGDAKDFNTNKVALNEIFPALQDAYAQVYPDLDITFDENKMNEFKTVLLNEKATPSDTQRALVNLLLAEDGDKDILKQQKQVLTEFAKAVVGLKTKLNVALGTEVDSSEATAWNFSLGQLDDKWAGIESAMTDEGTEILDQIRDLYRARLLNGIVPAGKTLSHAKVDD

SEQ ID NO: 478 - protein, 1361 aa, Lactobacillus casei
MTKLGKPYGIGVDIGSNSIGFAAVDENSHLIRLKGKTVIGARLFEEGKAAADRRASRTTRRRLSRNRWRLSFLRDFFESHITPTGPNFFMRQKYSEISPKDKARYKYEKRLFNDRTDAEFYQQYPTMYHLRNRLLTDPSKADVREIYFAIHHILKSRGHFLTSGYAKDFNTNKVALNEIFPALQDAYAQVYPDLDITFDENKVNEFKTVLLNEKATPSDTQRALVNLLLAEDGDKDILKQQKQVLTEFAKAVVGLKTKLNVALGTEVDSSEATVWNFSLGQLDDKWAGIESAMTDEGTEILDQIRDLYRARLLNGIVPAGNTLSQAKVDDYAQHHEDLELFKDYLKQLEDDGTAKAIRQLYDRYIDGDDAKPFVREDFVKALTKEVTAHPNAKSPELLERLAQPDFMLKQRNKANGAIPVQMQQRELDQIIKNQSVYYDWLAAPNPVEKHRKSMPYQLDELLNFRIPYYVGPLVTAKEQKAAQGGVFAWMVRKDPDGNITPYNFDEKVDREASANTFIQRMKTTDTYLIGEDVLPKQSLLYQRYEVLNELNNVRVNNEKLSIEQKQQVIRELFERHNSVTIKQFAENLRAHGDYAHIPEIRGLADEKRFLSSLSTYRQLKSLLPDAIDDPAKQADIENIIAWSTVFEDAAIFKTKLKEINWLDSQTITKLSNIRYRGWGQFSHKFLNGLTLGNGHTIIQELFLSNNNLMQILTDETLQKKMTELNADKLKAANINDAIDDAYTSPSNKKALRQVLRVIEDIKRAADGQDPSWLYVETADGGGTPGKRTRARQHQLQEIYANAAHELIDSAVRGELEDKIADKADFNDRLVLYFMQGGRDIYTGTPLNIDQLSSYDIDHILPQSLIKDNSLDNRVLVHAIINREKNATFASTIYAQKMNATWRQWHEAGLISGRKLRNLQMRPDQIDKYASGFVARQLVETRQIIKLTEQIVAAQYPETKIIAVKAGLSHQLREELEFPKNRDVNHYHHAFDAFLAARIGTYLLKRFPNLQAFFTYGKFKKADVKKLRGFNFIRDITHAEDKIVVKDTGEVIWDKKRDVDELDRIYNFKRMLITHEVHFEKADLFKQTVYGAKDSKEAGGKKQLISKKKGYPVDIYGGYTQETGSYLSVVRLTKKAMYAVVKVSTRDAAKLAVAKSISEQKENETLNDIIDEKLSKISKNGKITHELFEVVLPRVGQKTLFKNSKYNLFLVNSDTYMHNYQELWMPREYQKMWKDISLSKYGDAQTEDQLDQIFGFIVSQVNSYFNLYDINQFRKKLNDAADKFATLPMRDTDDMQGKIATIGQLLIGLQANAARSDLRNLDIKTPLGLLQIPNGISLDSDTSVVYQSPTGLLEREVHLSDL

SEQ ID NO: 479 - protein, 1128 aa, Lactobacillus casei
MTKLGKPYGIGVDIGSNSIGFAAVDENSHLIRLKGKTVIGARLFEEGKAAAKRRAGRTTRRRLSRNRWRLSFLRDFFESHITPTDPNFFMRQKYSEISPKDKARYKYEKRLFNDRTDAEFYQQYSTMYHLRNRLMTDPSRADVREIYFAIHHILKSRGHFLTPGDAKDFNTNDVALDEIFPALQDAYAQVYPDLGITFDEDKANEFKTILLNEIATSIDTQRALVKLLLAEEDDKDILKQQKQVLTEFAKAVVGLKTKLNLALGTEVDSSEATAWNFSLGQLDDKWAGIESAMTDEGTEILDQIRDLYRARLLNGIVPTGKTLSQAKVDDYTQHHEDLQLFKAYLKQLEDDGTAKAIRQLYDRYIDGDDAAPFLRENFVKALTKDVTAHPNTKSPELLERLAQPDFMLKQRNKANGAIPVQMQQRELDQIIKNQAVYYDWLAAPNPVEKHRKSMPYQLDELLNFRIPYYVGPLVTAKEQKAAQGGVFAWMVRKDPEGNITPYNFDEKVDREASANTFIQRMKTTDTYLIGEDVLPKQSLLYQRYEVLNELNNVRVNNEKLSIEQKQQVIRELFERHNSVTIKQFAENLRAHGDYAHIPEIRGLADEKRFLSSLSTYRQLKSLLPEAIDDPAKQADIENIIAWSTVFEDAAIFKTKLKEISWLGSEAITKLSNIRYRGWGQFSRKFLNGLTLGNGHTIIQELLLSTNNLMQILTDETLQKKMTELNADKLKTANINDAIDNAYTSPSNKKALRQVLRVVDDIKRAADGQDPSWLYVETADGGGTPGKRTRARQHQLQEIYANAAHELIDTAVRGELEDKISDKADFNDRLVLYFMQGGRDIYTGAPLNIDQLSSYDIDHILPQSLIKDNSLDNRVLVHAIINREKNATFASTIYAQKMNATWRQWHEAGLISGRKLRNLQMRPDQIDKYASGFVARQLVETRQIIKLTEQIVAAQYPDTKIIAVKAGLSHQLREELEFPKNRDVNHYHHAFDAFLAARIGTYLLKRFPNLQAFFTYGKFTKADVKKLRGFNFIRDITHAEDKIVAKDTGEVVWDKQRDVDELDRIYNFKRMLITHEVRFETADLFKQTVYGARDSKEAGGSKQLIPKKKDIQLIFMGAISERTRPILPL

SEQ ID NO: 480 - protein, 1366 aa, Lactobacillus casei
MTKLGKPYGIGVDIGSNSIGFAAVDENSHLIRLKGKTVIGARLFEEGKAAAYRRASRTTRRRLSRNRWRLSFLRDFFESHITPTDPNFFMRQKYSEISPKDKARYKYEKRLFNDRTDAEFYQQYPTMYHLRTRLLTDPSKADVREIYFAIHHILKSRGHFLTPGYAKDFNTNKVALNEIFPALQDAYAQVYPDLDITFDENKVNEFKTVLLNEKATPSDTQRALVNLLLAKEGDRDILKQQKQVLTEFAKAVVGLKTKLNVALGTEVDSSEATAWNFSLGQLDDKWAGIESAMTDEGTEILDQIRDLYRARLLNGIVPAGKTLSQAKVDDYAQHHEDLELFKDYLKQLEDDGTAKAIRQLYDRYIDGDDAKPFVREDFVKALTKEVTAHPNAKSPELLERLAQPDFMLKQRNKANGAIPVQMQQRELDQIIKNQAVYYDWLAAPNPVEKHRQSMTYQLDELLNFRIPYYVGPLVTAKEQKAAQGGVFAWMVRKDPDGNITPYNFDEKVDREASANTFIQRMKTTDTYLIGEDVLPKQSLLYQSYEVLNELNNVRVNDNKLSFDQKQQVLGELFERHNTVTIKQFVDNLLAHGDYDRIPEVRGLADEKRFLSSLSTYNQLKGILHEAIDDADKQTDIENIIAWSTIFEDKAIFKTKLNEISWLNAGMINSLANIRYRGWGQFSHKLLNELTLSTGRTVFEELLISSRNLMQILTDEVLKQKIAELNAHELKASGIYAAIDDAYTSPSNKKALRQVLSVIDDITNAAGQAPNWLYIETADGDGVPGKRTNSRQRKIQEIYANAAQELITGSVRGEFEDKIASRADFTDRLVLYFMQGGRDIYTGEPLNIDNLSSYDIDHILPQSLIKDNSLDNRVLVHPLVNREKDTIFASTRFAKQMNGMWRQWHAAGLISSRKLRNLQMRPDEIDKYASGFVARQLVETRQIIKLTEQIVADQYPDTKIIAVKAGLSSQLRKELDFPKNREVNHYHHAFDAFLAARIGTYLLKRYPNLEPFFTYGKFKKTEVKKLKSLKSLKSFNFIRDMTHAKDKIVAKETGEIVWDNASDINELDRIYNFKRMLITHEVRFETASLFKQTLYAAKNSKNRGGSRQLIPKKKGYLVDIYGGYTQETGSYLSVVRLTKKAMYAVVKVSTRDAAKLAVAKSISEQKENETLKKIIDGKLSKTSKKGKTTHQLFEIVLPRVGQKTLFKNSKYNQFLVNSDTYMHNYQELWMPREYQRMWKDILLSNHGDAQIEGQLDQIFKFIVSQVNSYFNLYDINQFRKKIADATDKFAKLPTHDTDNARGKIATIGQLLIGLQANAMRSDLRNLDIKTPFGLLQIGTGITLDLDTSIIYQSPTGLFEREVPLTDL

SEQ ID NO: 481 - protein, 1354 aa, Lactobacillus coryniformis
MTLHYNVGLDIGTNSVGYTIVDDNGKILQVKGKNGYGVRVFKEGATAAERRIFRTTHRRLKRRKWRLRLLQDFFEPYILPQDDGFFIRRKESNLVLNDRDEDTASLFNDRSDRDFYQAYPTIYHLRQALMTEKRQFDVREIYLAMHHIIKYRGHFLLNGTVNNFTNNKIDLHSDFEELNALLLNVIPELKFQIDLDHSTMFQTTLLNTTISRSGRQRDLVKSFYNGSDDKQLAKQQKSVATELLKAILGLKAKFHKLFNLDLLETTEWEFSFDAEDIDDKLAKLEPLMTENQQQVMDILQRIFAAITLNGIVPEGKTLSASKVDSYQKHKQDLKLLKAIAQHSDKKTATVLQTAYNEYINGIASKPLKQEDFYKRLTNAVKKSSDPQVADMLALIDQEKFLPKQRTKENGAIPHQLHQLELERIIDNQKDYYPWLAELNPNQARQKVAKYKLSELVAFRVPYYVGPLIEPEVQQATSNAHFAWMARKEAGPITPWNFDQKVDRNVSAERFIKRMTTKDTYLLAEDVLPLHSLLYQRFIVLNELNNVRVNGQKLTKKQKQAVYQDLFKRQPHVTKKQFKSYLVQTGEFAESSKIEGLANETSFNSGLTTENELRKIFGAQLDEARYQVDFEQIIEWATLFEDAKILRTKLAEITWLTTEQIEKLAGIRYRGWGRFSRKLLAGLRDQNGQQIIDLLWDTPNNFMVIVSQAAFSEAITKENEKLIDRRGAQDVITDLYTSPQNKKALRQVLAIVADVQKAMGGVPPQRIFIEFAREDEKNPRRSVERSRQLEKLYQTISNEFLINSEVRQELKEAVDQKVNFKDRLFLYFLQGGVDLYSGKRINIDQLSHYDIDHILPQSFIKDDSLDNRVLVSQKLNRSKSDSVPLSEFANYKFGPAMQAKWLQLKEAGLLSKRKYDNLTLDPTKLSKFAPLGFVNRQLVETRQVIKLAANLLASEETKVVTIKANMTHQVRKELDFPKNRNVNNYHHAFDAYLTAFVGIFLSKRYPKLKPYFTYGDFQKGNKLPDLKNFNFLYELKNKDRSIDSNTGEIIWDKQRDLAYMNKIYNFKKVTVVHEVLTKSGALYNQTLYKASEDKASGRGTKQLIRKKDNMPTELYGGYTGSTSAFMSIVRLWKKDKPYYKVVGIPTRMAAKLANQAQLLDYLTKKFTTRKLVKKTGDYKTTVERFELVVPKVGFNQLVIDGGQPFMLGSATYQYNARELFISKEAVKALNKQLSTHVDLVQVFDEILVQVNRWFPLYDTNGFREKLSHGRDRFMKLNDSFEEKSDTQIDVLNRILIGFHANAARTNLKILGLGTDLGFMTQQAGIRLTEKAILVHQSPSGLFERKVALRDLKGLR

SEQ ID NO: 482 - protein, 544 aa, Lactobacillus crispatus
KYYLYFMQLGRDAYTGKPINIDEVSQYYDIDHILPQSFIKDDSLNNRVLVAKPINNGKSDGVPLKLFGDNLATGLGITVKQMWNNWADKGLINKAKQNNLFLDPENINKHQASGFIRKQLVETSQIIKLATTILQAEYPKTKIIVVKASSNHYLRNEFDLYKSREVNDYHHAIDAYLTTICGNLLYQAYPKLRPFFVYGQFKKFSSDPKKENEILKKTKNFDFVAKLLGSKAPNEIRSQQGKVLFEKNKIRLQLNKAYNYKYMLVSRDTTTKNQEMFGMTIYPRAERDIAKSRKLIEKRKGFSTDIYGGYTGTAAAYMAIVRINKTKSSQYKVIAVPMTKRAILNKAEKEGNYEKILKQILSPSILYNDKGKRKAGVISFDIIKGKVPYNQVVQDGNKKFLLKSAIYLCNAKQLVLSEEAMRVITGHWLDSDKQDQELLDVYDEILEKIDRYLPLFDIRDFRNKLHKGREKFLKLNAEDKFKAIIQILKGLHDNSDTGELKDIGITVPFGQLQNNSGITLSSDTILVYQSPTGLFEKRVKISSL

SEQ ID NO: 483 - protein, 298 aa, Lactobacillus crispatus
MDELNKISVNGKKLSVSVKQELYEDLFKKNNTVSAKQLKNWLIENQKLPYIKIKGLADQTKFNSSLSTYIKLKKSGLFVDKLDSNEFRDDFEKIIEWSTIFEDKQIYIQKLQTIDWLTAKQIQFLQNIRLQGWGRLSKKLLTAIVDSNGQNIIEQLWNSQQIFMSIVNKADIKGTITDANQDLMHSNSMEDILSEAYTSPANKKMIRQVVKVVHDIQKAASGQAPKQIAIEFARESRRNSKLSQTRGHKLQDIYQKISGDIVNKNLKDKLAEYIKNNQLSVWEKTSFQMNKNDQDFLF

SEQ ID NO: 484 - protein, 279 aa, Lactobacillus crispatus
MNGKKLSVSVKQELYEDLFKKNNTVSAKQLKNWLIENQKLPYIKIKGLADQTKFNSSLSTYIKLKKSGLFVDKLDSNEFRDDFEKIIEWSTIFEDKQIYIQKLQTIDWLTAKQIQFLQNIRLQGWGRLSKKLLTAIVDSNGQNIIEQLWNSQQIFMSIVNKADIKGTITDANQDLMHSNSMEDILSEAYTSPANKKMIRQVVKVVHDIQKAASGQAPKQIAIEFARESRRNSKLSQTRGHKLQDIYQKISGDIVNKNLKDKLAEYIKNNQLNKDKYYTR

SEQ ID NO: 485 - protein, 538 aa, Lactobacillus crispatus
MQLGRDAYTGKPINIDEVSQYYDIDHILPQSFIKDDSLNNRVLVAKPINNGKSDGVPLKLFGDNLATGLGITVKQMWNNWADKGLINKAKQNNLFLDPENINKHQASGFIRKQLVETSQIIKLATTILQAEYPKTKIIVVKASSNHYLRNEFDLYKSREVNDYHHAIDAYLTTICGNLLYQAYPKLRPFFVYGQFKKFSSDPKKENEILKKTKNFDFVAKLLGSKAPNEIRSQQGKVLFEKNKIRLQLNKAYNYKYMLVSRDTTTKNQEMFGMTIYPRAERDIAKSRKLIEKRKGFSTDIYGGYTGTAAAYMAIVRINKTKSSQYKVIAVPMTKRAILNKAEKEGNYEKILKQILSPSILYNDKGKRKAGVISFDIIKGKVPYNQVVQDGNKKFLLKSAIYLCNAKQLVLSEEAMRVITGHWLDSDKQDQELLDVYDEILEKIDRYLPLFDIRDFRNKLHKGREKFLKLNAEDKFKAIIQILKGLHDNSDTGELKDIGITVPFGQLQNNSGITLSSDTILVYQSPTGLFEKRVKISSL

SEQ ID NO: 486 - protein, 206 aa, Lactobacillus crispatus
MQLGRDAYTGKPINIDEVSQYYDIDHILPQSFIKDDSLNNRVLVAKPINNGKSDGVPLKLFGDNLATGLGITVKQMWNNWADKGLINKAKQNNLFLDPENINKHQASGFIRKQLVETSQIIKLATTILQAEYPKTKIIVVKASSNHYLRNEFDLYKSREVNDYHHAIDAYLTTICGNLLYQAYPKLRPFFVYGQFKKFSSDPKKRK

SEQ ID NO: 487 - protein, 857 aa, Lactobacillus crispatus
MTKLNNEYMVGLDIGTNSCGWVATDFDNNILKMHGKRALGSHLFDEGVSAADRRAFRTTRRRIKRRKWRLKLLEEIFDEEMAKVDPNFFARLKESGLSPLDTRKNVSSIVFPTKKMDKQFYKKFPTIYHLRNALMKQDKKFDLRAIYIAIHHIVKYRGNFLSNSSISNFSASKIEIDRFVNELNDLYSIFLPESGVIFDAGNASKVEDIIRNEQMFKLDKIKEIADVLPDTENKSGLKLSKKISKEISKAILGYKAKFEIILQVNVDKTDSSIWNFKLNDENADVNLSEITSDLTDTQLQILDLVRNLFSAISLLNIVDEGSTLSESMIRKYNDHAQDLKLLKTVIKNHSDRKKAHNLQLAYDKYVNNRHFVDVETKKAFPNKHLYRKSDFYEIVKKNLDASKEAVQIRKEIALDKFMPKQRSDENGVIPFQLNQIELDKIIENQGKYYPFLKEINPIKAHRMQAPYKLDELIRFRVPYYVGPMIEPTNSSYPQTRQNQSFAWMVRKAKGRITPWNFDEKVDRQKSANNFIKRLTTKDTYLFGEDVLPANSLLYQKYTVLDELNKISVNGKKLSVSVKQELYEDLFKKNNTVSAKQLKNWLIENQKLPYIKIKGLADQTKFNSSLSTYIKLKKSGLFVDKLDSNEFRDDFEKIIEWSTIFEDKQIYIQKLQTIDWLTAKQIQFLQNIRLQGWGRLSKKLLTAIVDSNGQNIIEQLWNSQQIFMSIVNKADIKGTITDANQDLMHSNSMEDILSEAYTSPANKKMIRQVVKVVHDIQKAASGQAPKQIAIEFARESRRNSKLSQTRGHKLQDIYQKISGDIVNKNLKDKLAEYIKNNQLSVWEKTSFQMNKNDQDFLF

SEQ ID NO: 488 - protein, 857 aa, Lactobacillus crispatus
MTKLNNEYMVGLDIGTNSCGWVATDFDNNILKMHGKRALGSHLFDEGVSAADRRAFRTTRRRIKRRKWRLKLLEEIFDEEMAKVDPNFFARLKESGLSPLDTRKNVSSIVFPTKKMDKQFYKKFPTIYHLRNALMKQDKKFDLRAIYIAIHHIVKYRGNFLSNSSISNFSASKIEIDRFVNELNDLYSIFLPESGVIFDAGNASKVEDIIRNEQMFKLDKIKEIADVLPDTENKSGLKLSKKISKEISKAILGYKAKFEIILQVNVDKTDSSIWNFKLNDENADVNLSEITSDLTDTQLQILDLVRNLFSAISLLNIVDEGSTLSESMIRKYNDHAQDLKLLKTVIKNHSDRKKAHNLQLAYDKYVNNRHFVDVETKKAFPNKHLYRKSDFYEIVKKNLDASKEAVQIRKEIALDKFMPKQRSDENGVIPFQLNQIELDKIIENQGKYYPFLKEINPIKAHRMQAPYKLDELIRFRVPYYVGPMIEPTNSSYPQTRQNQSFAWMVRKAKGRITPWNFDEKVDRQKSANNFIKRLTTKDTYLFGEDVLPANSLLYQKYTVLDELNKISVNGKKLSVSVKQELYEDLFKKNNTVSAKQLKNWLIENQKLPYIKIKGLADQTKFNSSLSTYIKLKKSGLFVDKLDSNEFRDDFEKIIEWSTIFEDKQIYIQKLQTIDWLTAKQIQFLQNIRLQGWGRLSKKLLTAIVDSNGQNIIEQLWNSQQIFMSIVNKADIKGTITDANQDLMHSNSMEDILSEAYTSPANKKMIRQVVKVVHDIQKAASGQAPKQIAIEFARESRRNSKLSQTRGHKLQDIYQKISGDIVNKNLKDKLAEYIKNNQLSVWEKNSFQMNKNDQDFLF

SEQ ID NO: 489 - protein, 347 aa, Lactobacillus crispatus
MVNLKSLVLILKKENEILKKTKNFDFVAKLLGSKAPNEIRSQQGKVLFEKNKIRLQLNKAYNYKYMLVSRDTTTKNQEMFGMTIYPRAERDIAKSRKLIEKRKGFSTDIYGGYTGTAAAYMAIVRINKTKSSQYKVIAVPMTKRAILNKAEKEGNYEKILKQILSPSILYNDKGKRKAGVISFDIIKGKVPYNQVVQDGNKKFLLKSAIYLCNAKQLVLSEEAMRVITGHWLDSDKQDQELLDVYDEILEKIDRYLPLFDIRDFRNKLHKGREKFLKLNAEDKFKAIIQILKGLHDNSDTGELKDIGITVPFGQLQNNSGITLSSDTILVYQSPTGLFEKRVKISSL

SEQ ID NO: 490 - protein, 534 aa, Lactobacillus crispatus
RDAYTDKPINIDEVSQYYDIDHILPQSFIKDDSLNNRVLVAKPINNGKSDGVPLKLFGDNLATGLGITVKQMWNNWADKGLINKAKQNNLFLDPENINKHQASGFIRKQLVETSQIIKLATTILQAEYPKTKIIVVKASSNHYLRNEFDLYKSREVNDYHHAIDAYLTTICGNLLYQAYPKLRPFFVYGQFKKFSSDPKKENEILKKTKNFDFVAKLLGSKAPNEIRSQQGKVLFEKNKIRLQLNKAYNYKYMLVSRDTTTKNQEMFGMTIYPRAERDIAKSRKLIEKRKGFSTDIYGGYTGTAAAYMAIVRINKTKSSQYKVIAVPMTKRAILNKAEKEGNYEKILKQILSPSILYNDKGKRKAGVISFDIIKGKVPYNQVVQDGNKKFLLKSAIYLCNAKQLVLSEEAMRVITGHWLDSDKQDQELLDVYDEILEKIDRYLPLFDIRDFRNKLHKGREKFLKLNAEDKFKAIIQILKGLHDNSDTGELKDIGITVPFGQLQNNSGITLSSDTILVYQSPTGLFEKRVKISSL

SEQ ID NO: 491 - protein, 278 aa, Lactobacillus crispatus
SVNGKKLSVSVKQELYEDLFKKNNTVSAKQLKNWLIENQKLPYIKIKGLADQTKFNSSLSTYIKLKKSGLFVDKLDSNEFRDDFEKIIEWSTIFEDKQIYIQKLQTIDWLTAKQIQFLQNIRLQGWGRLSKKLLTAIVDSNGQNIIEQLWNSQQIFMSIVNKADIKGTITDANQDLMHSNSMEDILSEAYTSPANKKMIRQVVKVVHDIQKAASGQAPKQIAIEFARESRRNSKLSQTRGHKLQDIYQKISGDIVNKNLKDKLAEYIKNNQLNKDKYY

SEQ ID NO: 492 - protein, 277 aa, Lactobacillus crispatus
SVNGKKLSVSVKQELYEDLFKKNNTVSAKQLKNWLIENQKLPYIKIKGLADQTKFNSSLSTYIKLKKSGLFVDKLDSNEFRDDFEKIIEWSTIFEDKQIYIQKLQTIDWLTAKQIQFLQNIRLQGWGRLSKKLLTAIVDSNGQNIIEQLWNSQQIFMSIVNKADIKGTITDANQDLMHSNSMEDILSEAYTSPANKKMIRQVVKVVHDIQKAASGQAPKQIAIEFARESRRNSKLSQTRGHKLQDIYQKISGDIVNKNLKDKLAEYIKNNQLNKDKY

SEQ ID NO: 493 - protein, 1368 aa, Lactobacillus curvatus
MSRPYNIGLDIGTSSIGWSVVDDQSKLVSVRGKYGYGVRLYDEGQTAAERRSFRTTRRRLKRRKWRLGLLREIFEPYITPIDDTFFLRQKQSNLSPKDQRKLYTQTSLFNDRTDRAFYDDYPTIYHLRYRLMTEKRQFDIREIYLAMHHIVKYRGHFLNEAPVSSFKSSEINLVAHFDRLNTIFADLFSESGFQLETDKLAEVKALLLDNQQSASNRQRQALSLIYTPSTNKAVEKQNKAIATELLKAILGLKAKFNVLTGIEAEDVKAWTLTFNAENFDEEMVKLESSLDDNAHQIIESLQELYSGVLLAGIVPENQSLSQAMITKYDDHQKHLKMLKAVREALAPGDRQRLKQAYDQYVDGQENTKAYSKEDFYGDITKALKNNPDHPIVSEIKKLIELDQFMPKQRTKDNGAIPHQLHQQELDRIIENQQQYYPWLAELNPNSKRQTVAKYKLDELVAFRVPYYVGPLITAEQQRQSSDAKFAWLIRKAEGRITPWNFDDKVDRQASANEFIKRMTTTDTYLLAEDVLPKQSLIYQRFEVLNELNGLKIDDQPITTELKQAIFTDLFMQKISVTVKNIQDYLVSEKRYASRPAITGLSDENKFNSRLSTYHDLKMIVGDAVDDVDKQADLEKCIEWSTIFEDGKIYSAKLNEIDWLTDQQRVQLAAKRYRGWGRLSAKLLTQIVNANGQRIMDLLWDTTDNFMRIVHSEDFDKLITEANQMMLAENDVQDVINDLYTSPQNKKALRQILLVVNDIQKAMKGQAPERILIEFAREDEVNSRLSVQRKRQVEQVYQNISNELLNNTEIRNELKDLSNSALSNTRLFLYFMQGGRDMYTGDSLNIDRLSTYDIDHILPQSFIKDNSLDNRVLVSQKMNRSKADQVPTDFTSVELGQKMQIQWEQMLRAGLITKKKYDNLTLNPDHISKYAMKGFINRQLVETRQVIKLATNLLMEQYGEDNIELITVKSGLTHQMRTEFDFPKNRNLNNHHHAFDAYLTAFVGLYLLKRYPKLKPYFVYGEYQKASQQDKWRNFNFLNGLKKDELVDENTEAVIWDKESGLAYLNKIYQFKKILVTRGVHENSGALFNQTLYAAKDDKASGQGGKQLIPAKQDRSTALYGGYSGKTVAYMCIVRIKNKKGDLYKVCGVETSWLAQLKQLTDEDSQKAFLEQKISPQFTKVKKQKGNIIEAVEEFEVIAPHILINQRFFDNGQELTLGSATYKHNEQELILDKTAVKLLNGALPLTQSEELAEQVYDEILDQVMHYFPLYDTNQFRAKLSTGKAAFMKLPWKSQWDGNKMVQVGQQVILDRILIGLHANAAMSDLKVLKMTTPFGMIQQSTGITLSADTQIIYQSPTGLFERRVALRDL

SEQ ID NO: 494 - protein, 669 aa, Lactobacillus delbrueckii
MAKPKDYTIGLDIGTNSVGWVVTDDQNNILRIKGKKAIGARLFTEGKVAAERRSFRTTRRRLSRRRWRIKMLEELFDEEIAKVDPSFFARLHESWISPKDKRKRYSAIVFPSPEEDKKFHESYPTIYHLRDKLMKDDQKHDIREIYIAVHQMIKARGNFLHDESVETYRSGMSSLGGRSERNILSVQTLEELNDLFAENEGTEEVELNVASAEQINDILTGGHLNADSQKEISNLLLPSSFPSFDDKAKEKQVKKLINNVATNISKAWLGYKADFSTILNLAKVDKDQKKIFAFALQGGDEEDKVQELESLLEQSQTDIVDRLIEIRHAIVLSEIVPVGMTLSEAMIDKYDQHKEDLITLKAVIRNTKDKKKAAKLQAIYDLYVKKRHADLAKAMKLTGIKKRSELLDPEELKKGISSLLDDSPEAVEIKQRLEEKTFLPLQRSNNNGVIPNQLHQVELDEIIKKQSKYYPFLAEKNPDESEEAQKKAPTKLDALLTFRVPYYVGPMITKEEQEAQNGHSFAWMVRRDPQDHEAITPWNFEKKVDKMASATQFIKRMTTKDTYLLGEDVLPASSLKYQLFTVLNELNNLRVNGKKLTSDEKEQVIEGLFKKQKTVKADKFVKYWQAKHIGADIKVKGLSDPSKFNSTMSTYIDFKKIFGDQLNDVNRQR

SEQ ID NO: 495 - protein, 544 aa, Lactobacillus delbrueckii
MTGCADYDVDHIMPQSFVKDDSLDNRVLVARAVNNQKSDKVPALLFGNKVVADLGITVREMWDKWQKLGMISKRKLSNLLTDPDALTEYRAQGFIRRQLVETSQVIKLTATILQSEFPDSKIIEVPAKYNSIVRKQFDLYKSREVNDFHHAIDAYLSTIVGNYLYQVYPNLRRMFVYGEFKKFSSNAEESAHDVARRVKSMNFLDDLLRGTHGDNIYCRSTGEIVFNRNDIISKLKQAYSFKQMLVTQEVFTKKSALFDQTVYPSPERDSKKRSGLIPRKKGMDTEIYGGYSGNKDAYFVLAEAVKEKGHTLQIVGVPIRALNTLKNSANYSEKLLEIIKPQVMFNKDTGKPIKGIKDVKILMDKIPCRQPVLEGESYYMLASSKYRYSLKQISLSQMSMKYILDYIDDPNFNKHEMINIDQQDEKECLLSVYDEILEKMDKYLPLFDIRSFRKKLHDGRDAFIALPVASEEKKPGEVDVIRKILKGLHANADITNLAELGFGTAALGALVSTGGIKISDDAVFIYQSPTGLFERRVKVSDLLK

SEQ ID NO: 496 - protein, 1356 aa, Lactobacillus farciminis
MTKKEQPYNIGLDIGTSSVGWAVTNDNYDLLNIKKKNLWGVRLFEEAQTAKETRLNRSTRRRYRRRKNRINWLNEIFSEELAKTDPSFLIRLQNSWVSKKDPDRKRDKYNLFIDGPYTDKEYYREFPTIFHLRKELILNKDKADIRLIYLALHNILKYRGNFTYEHQKFNISNLNNNLSKELIELNQQLIKYDISFPDDCDWNHISDILIGRGNATQKSSNILKDFTLDKETKKLLKEVINLILGNVAHLNTIFKTSLTKDEEKLNFSGKDIESKLDDLDSILDDDQFTVLDAANRIYSTITLNEILNGESYFSMAKVNQYENHAIDLCKLRDMWHTTKNEEAVEQSRQAYDDYINKPKYGTKELYTSLKKFLKVALPTNLAKEAEEKISKGTYLVKPRNSENGVVPYQLNKIEMEKIIDNQSQYYPFLKENKEKLLSILSFRIPYYVGPLQSAEKNPFAWMERKSNGHARPWNFDEIVDREKSSNKFIRRMTVTDSYLVGEPVLPKNSLIYQRYEVLNELNNIRITENLKTNPIGSRLTVETKQRIYNELFKKYKKVTVKKLTKWLIAQGYYKNPILIGLSQKDEFNSTLTTYLDMKKIFGSSFMEDNKNYDQIEELIEWLTIFEDKQILNEKLHSSKYSYTPDQIKKISNMRYKGWGRLSKKILMDITTETNTPQLLQLSNYSILDLMWATNNNFISIMSNDKYDFKNYIENHNLNKNEDQNISDLVNDIHVSPALKRGITQSIKIVQEIVKFMGHAPKHIFIEVTRETKKSEITTSREKRIKRLQSKLLNKANDFKPQLREYLVPNKKIQEELKKHKNDLSSERIMLYFLQNGKSLYSEESLNINKLSDYQVDHILPRTYIPDDSLENKALVLAKENQRKADDLLLNSNVIDRNLERWTYMLNNNMIGLKKFKNLTRRVITDKDKLGFIHRQLVQTSQMVKGVANILDNMYKNQGTTCIQARANLSTAFRKALSGQDDTYHFKHPELVKNRNVNDFHHAQDAYLASFLGTYRLRRFPTNEMLLMNGEYNKFYGQVKELYSKKKKLPDSRKNGFIISPLVNGTTQYDRNTGEIIWNVGFRDKILKIFNYHQCNVTRKTEIKTGQFYDQTIYSPKNPKYKKLIAQKKDMDPNIYGGFSGDNKSSITIVKIDNNKIKPVAIPIRLINDLKDKKTLQNWLEENVKHKKSIQIIKNNVPIGQIIYSKKVGLLSLNSDREVANRQQLILPPEHSALLRLLQIPDEDLDQILAFYDKNILVEILQELITKMKKFYPFYKGEREFLIANIENFNQATTSEKVNSLEELITLLHANSTSAHLIFNNIEKKAFGRKTHGLTLNNTDFIYQSVTGLYETRIHIE

SEQ ID NO: 497 - protein, 1313 aa, Lactobacillus fermentum
MHYLDEIFAPHLQEVDENFLRRLKQSNIHPEDPAKNQAFIGKLLFPDLLKKNERGYPTLIKMRDELPVEQRAHYPVTNIYKLREAMINEDRQFDLREVYLAVHHIMKYRGHFLNNASVDKFKVGRIDFYKSFNVLNEAYEELQNGEGSFTIEPSKVEKIGQLLLDTKMRKLNRQKAVAKLLEVKVADKEETKRNKQIATAMSKLVLGYKADFATVAMANGNEWKIDLSSETSEDEIEKFREELSDAQNDILTEITSLFSQIMLNEIVPNGMSISESMMDRYWTHERQLAEVKEYLATQPASARKEFDQVYNKYIGQAPKERGFDLEKGLKKILSKKENWKEIDELLKAGDFLPKQRTSANGVIPHQMHQQELDRIIEKQAKYYPWLATENPATGERDRHQAKYELDQLVSFRIPYYVGPLVTPEVQKATSGAKFAWAKRKEDGEITPWNLWDKIDRAESAEAFIKRMTVKDTYLLNEDVLPANSLLYQKYNVLNELNNVRVNGRRLSVGIKQDIYTELFKKKKTVKVSDVASLVMAKTRGVNKPSVEGLSDPKKFNSNLATYLDLKSIVGDKVDDNRYQTDLENIIEWRSVFEDGEIFADKLTEVEWLTDQQRSALVKKRYKGWGRLSKKLLTGIVDENGQRIIDLMWNTDQNFMQIVNQPVFKEQIDQLNQKAITNDGMTLREWVESVLDGAYTSPQNKKAIWQVVRVVEDIVKAVGNAPKSISIEFARNEGNKGEITRSRRTQLQKLFEDQAHELVKDTSLTEELEKAPDLSDRYYLYFTQGGKDMYTGDPINFDEISTKYDIDHILPQSFVKDDSLDNRVLVSRAENNKKSDRVPAKLYAAKMKPYWNQLLKQGLITQRKFENLTMDVDQNIKYRSLGFVKRQLVETRQVIKLTANILGSMYQEAGTDIIETRAGLTKQLREEFDLPKVREVNDYHHAVDAYLTTFAGQYLNRRYPKLRSFFVYGEYMKFKHGSDLKLRNFNFFHELMEGDKSQGKVVDQQTGELITTRDEVAKSFDRLLNMKYMLVSKEVHDRSDQLYGATIVTAKESGKLTSPIEIKKKRPVDLYGAYTNGTSAFMTIIKFTGNKPKYKVIGVPTTSAVGLKRVGKPGSESYNQELHRIIKSNPKVKKDFEIVVPHVSYSQLIVDDDCKFTLASDTYQHPATQLVLSKESMEIIADDFKFVKENTATADEQLVRVFDEIVNQMNHYFTIFDQRSNRQKVTKARDKFVSLPTESEYEGAKKTQVGKTEVITNLLMGLHANSAQGDLKVLGLSTFGFFQSSGGLNLSEDAMIVYQSPTGLFERRICLKDI

SEQ ID NO: 498 - protein, 1327 aa, Lactobacillus florum
MTEQQQPYNIGLDIGTSSIGWAVTDQNDKLLHIRGHNGIGVRLFKEGESAAERRGFRTTRRRLSRRRWRLRFLDRIFDAELAKVDPNFLARLKQSNISPLDPNKQMFGNILFDDPQFDDQKFHQQYPTIYHLRSALAQPDAPQADVRLIYLALHHMIKFRGHFLNGAAVEKFHGGQLHLESEFQELNQIFSNQQRDHVQLQTSSLDEVATILKDNQRTPSDRQRELSARLFVPVDKTIDKENKKLATELLKAVLGLKAKFDVILGVEATDPQAFKLQFSSDDFDDKIAELASELTDEANEILTVLQRLYFSLNLADILTNRQTKQVADSISTAMINRYDDHKHHLKMLKELEAQVTQEQRDGLKKAYDEYIDGDKPTIDTFYTNIKKNLDDSELANQIKSLIDLQAFMPKQRSKENGSIPHQLHQRELDQLIEVQGKYYPWLLAAKDKLDALIAFRVPYYVGPMIDPNQSDDPQNTKFAWMVRKEAGEITPWNFEEKVDKTSSATNFIKRMTTTDTYLLGEPVLPKNSLLYQQFTVLNELNKLKVNGKALTVDQKKYLYEHVCKKQRRVTLKKLSDCLMARGDFPMGAIFTGTTDQKNMNNTLKTYQDFQEIFGDEIDNPDRQVDFEKMIEWSAIFEDREIFKLKLAELNWLTSEQLERVSKKRYQGWGRLSQKLLTHIVNENGERIIDQLWNTNQNFMEIMGQDSVKQAIQEHNGANVAQTGINETIDELYTSPQNKKAIRQILLVVDDIKKAVGYAPANIMMEFAREDRDDHRLIASRARQLEKTYQEISKNWFDNESVTQELKDQIKNKTKFTDRLYLYFIQGGIDLYTGHPLNIDQLSSYDIDHILPQSFLLDNSLNNRVLTSQAENRVHKEDRLPGETVANKMRPTWKMMREQGLMTQRKYNNLTLKPDQISKFNNRGQFINRQLVETRQVIKLAADIMSQKYQADQTKVVTVKANLTHHMREKFNFYKSRNVNDYHHAFDAYLTLFVGNWLLKEYPKLQPYFVYGDFAKTGTNNLKSFNFLYRFERDHKLNDKGAIDTDKDQQLGYMKRIYRFKKMLVTKQLETNEGALYGQTLYPAPKNDKKTRNLINSKKNRPSDIYGGYSNENGSFLTLVKLKKGSKYDYRLVAVPVSKISEIKESELATIEKAIAPQFLKSSGKYRDFQVVLSKILINQKVIDDGMIFTIGSKSYKHNAKQVVLSDNSIQIVSTLSRISDKEKLITVFDEIVDITSKYLPWYKVNDVEKTKMLFRQMQDIDEMKKIIDNSLIGLHCNASITDLGKVGLSKYWGRFVLTAGISLTVDAQLIYQSPTGLFEHRVKVSDL

SEQ ID NO: 499 - protein, 1386 aa, Lactobacillus hominis
MTKITEDYIVGLDIGTNSCGWVAMDSKNTILRMHGKTAIGSHLFDAGNSAADRRAFRTTRRRIKRRKWRLKLLEEIFDSHLAKVDPYFFARLKESGLSPLDTRKNVSSIIYPTSLEDKKFYVDNPTIYHLRYKLMTEDRKFDLREVYLAIHHIVKYRGNFLYNTPVKAFEASKIDVKGSLKKLNELYEGLDSEFNVELDSNNALEIENIIRDKKIFKINKVKEINQLLSLKTEDKERTKLMKDVSKQIVNAILGYKTKFETILLKDVSKDEADDWEFKLTDVDADNKFENLIGDLNENEQEILLVIRKLANAITLSNIVEEGKTLSESMKDKYKKHSDDLKLLKQVISDHPDRDKAKKLALAYDLYVNNRHGKILQAKDILEKKKTLSKEDFYKEIKKNLDDSKESQEILDAISLDSFMPKQRTNENGVIPYQLHQLELDKIIENQGKYYPFLKEVNPVSSHLKQAPYKLDELIRFRVPYYVGPLISPNESTKNKQTKKNQNFAWMIRKEQGQITPWNFDQKVDRMASANKFIKRMTTIDTYLLGEDVLPANSLLYQKFTVLNELNNVKINGKRISVPLKQELYNNLFKKNSTVTTNKLKSYLKENYKLIKVEIKGLSDEKKFNSGLTTYNKLKNLKIFDQQIDDPNYNKDFERIIEWSTIFEDKAIYKEKLKTIDWLSDRQIDKLSKIRMQGWGQLSKKLLSQLTDNNGQTIIEQLWDSQNNFMQIVNQADFKDAIAVANQNLLVDTSVEDILNEAYTSPANKKAIRQVVKVVDDIVKATSGKVPKQIAIEFTRDADDNAKISQSRANKLRKVYKEMSNELASETIRNELERVAKDQKLLKDKHYLYFMQLGRDAYTGELIDIDNLEQYDIDHVLPQSFIKDDSLENRVLVKKAVNNGKSDNVPVKLYGNRMATDLGMTIRHMWEKWKEQGLITKTKYNNLIIDPDKINKYESSGFIHRQLVETSQIIKLVSTILQSKYPDTEIIVVKARYNHYLRKRLNLYKSREVNDYHHAIDAYLSAICGNLLYQVYPYLRPFFVYGQYKKFSSEPEKEKIIYDKTRRYNFISQIFENKDNDIISRETKKKVFDKKDIIEKLKRAYNYKYMLVSRETETHDQEMFKMTVYPRLSRDTKKSRNLIPKKKDMPTEIYGGYTNNSDAYMIIARINKKKGPEYRVFGVPMRELVNLRKAEKNGHYKAYLKQVLEPEIMYSKNGKKNKTISSFEIVKAKVPYKQVILDGDKKFMLASSTYVQNAKQLTLSQYSMQAITDNCENDTEEEKALVEAYDEILTNIDKYLPLFDINKFREKLHAGREKFVDLPLAEKKETILQVLNGLHDNAVMPKIKSLGLSTPLGFMQFHTGVSLSENAKLIYQSPTGLFEKRLKISDL

SEQ ID NO: 500 - protein, 270 aa, Lactobacillus iners
MITYLKDNDDITLSFPKDQLINIFKNSNLNSTEKSDQLKPFFGRTNLEKGIIKLLSGGKQDLSNMFRDETLKNSNYKNLKFSDNRFDDERDGYAADLGDRIDLLILLKQIYDASILESMMSQARVSIDGHKYISSAKVCAYEKHKSDLKRLKSLIKKYLPSEYNNIFRKITEKDNYVAYSKSNITNNKREKALKYVKYVDFTKYLTKKLKTIKTQDAEDDQEIFEIKGELEKQSFLPKQRTLDNSIIPYQLHLMELKKYLIINLNIMTFC

SEQ ID NO: 501 - protein, 255 aa, Lactobacillus iners
MITYLKDNDDITLSFPKDQLINIFKNSNLNSTEKSDQLKPFFGRTNLEKGIIKLLSGGKQDLSNMFRDETLKNSNYKNLKFSDNTFDDERDGYAADLGDRINLLILLKQIYDASILESMMSQARVSIDGHKYISSAKVCAYEKHKSDLKRLKSLIKKYLPSEYNNIFRKITEKDNYVAYSKSNITNNKREKALKYVEYVDFTKYLTKKLKTIKTQDAEDDKEIFEIKGELEKQSFLPKQRTLDNSIIPYQLHLME

SEQ ID NO: 502 - protein, 343 aa, Lactobacillus iners
MLAKDDQEGITVKDKIISLLTFRLPYYIGPVNPAVHGKFAWVKRLANGKVTPWNYKEKIDIDASHEEFIKTKLSKCSFLIGCDVLPKNSLLYQKYMVLSELNTIKFNGVNISEKLKDDIYQNLFKNIQKVTKKRLQNYIKEHENIIGDVIVTGIDNAFKQGLVSYLKFKKIIGDKIDDDRYQKVLEKIIRDITLYDECAGKKIKKEYKDSDLFTEDELNKIVKLTFNDWGRLSAELLDQLEGEDTVSGETGKIIEFMQKHNYNLMQLMSKKFTFKYKIDEINKSYYQHDKFNYKSMIDSLYVSPATKRILWQSLKVVHEISKIMKHDPEKIFYRNGTFQRRSS

SEQ ID NO: 503 - protein, 447 aa, Lactobacillus iners
MLYDHKLIGDKKYARLIRSKAFTDDELAGFIARQLVETRQATKETADLLKRLCPKSRIVYAKAQNASIFRQKFDIPKSRTINDLHHAQDAYLNIVVGNIFDTKFTQDPRNFIKNTKDSRNYNLEKIYDYNVERNNYVAWIAPDSKTNGTIANVKCNLSTKDFRVTRPSFYKKGALFNQNLSRKGSNLAPIKEHSPKSNPLKYGGYSGKNNSFFVVVAGKDNKGKDIVKLIPVNTLIYNKMLHCDYKAKQELLTSYVANNFAINNFRIVKDDIKMYSLVKIDGAYYYLVGGTDERIEVKNAMQLLLSKDSIKAVKILEKESKDQFANIKNYKDIDIKLGRTFNEVISKYTNSVFGKSMLISDKYRKDIFKSVDKSILEFNSLNTIAKADNLLKFVTSMRPAGSVDALKMVGLIERIRKSNVISNFNEFKLINQSVTGLFENEEDLLKL

SEQ ID NO: 504 - protein, 667 aa, Lactobacillus iners
MQKHNYNLMQLMSKKFTFKSKIDEINKSYYQHDKFNYKSMIDSLYVSPATKRILWQSLKVVHEISKIMKHDPEKIFIEMARSKEDHPKRKLSRKADLKQVYKDSKKQIISIIGKDKYQDLSNELDNKDDRDLRWDNLYLYYTQLGRSMYSLKPIDISELMNKNLYDQDHIFPKSKKYDDSIENRVLVEKELNVKKSDIYPISDANIIPQKIKGQVESFWKMLYDHKLIGDKKYARLIRSKAFTDDELAGFIARQLVETRQATKETADLLKRLCPKSRIVYAKAQNASIFRQKFDIPKSRTINDLHHAQDAYLNIVVGNIFDTKFTQDPRNFIKNTKDSRNYNLEKIYDYNVERNNYVAWIAPDGETNGTIANVKCNLSTKDFRVTRPSFYKKGALFNQNLSRKGSNLAPIKEHSPKSNPLKYGGYSGKNNSFFVVVAGKDNKGKDIVKLIPVNTLIYNKMLHCDYKAKQELLTSYVANNFAINNFRIVKDDIKMYSLVKIDGAYYYLVGGTDERIEVKNAMQLLLSKDSIKAVKILEKESKDQFANIKNYKDIDIKLGRTFNEVVSKYTNSVFGKSMLISDKYRKDIFKSVEKSILEFNHLDTIGKADNLLKFVTLMRPSGSAHSLKMVGLIERIRKSNVISNFNEFKLINQSVTGLFENEEDLLKL

SEQ ID NO: 505 - protein, 1395 aa, Lactobacillus jensenii; identical to SEQ ID NO: 118

SEQ ID NO: 506 - protein, 1382 aa, Lactobacillus mucosae
MDIGTNSIGWTAIDDHFSLLRVKGKNAIGVRTFKEGETAADRRGFRTARRRLSRRRWRLQFLDEFFAPYLAEVDPNFLARLKQSDISAKDPAKNQEYMGKLLFPDQEAASDGNGYPTLIQMRKAMPAEKAADFPVFNIYQLRYALMNEKRKFDLREIYLAVHHIVKYRGNFLNNTSVDKFKADQIDFNKSFETLNDLFRQVQPIAPFQIDLTKVDELGKLLLDTKQKKLDRQKAVAKLLPLIEDGTDKEIVKAHQQTAREISKLILGYKAKVGLILQNNLDQTLDMSTENSDDQLMQIAEELDDYQMELINQLSLLYSQIMLNEIVPNGETVSASMLNRYYKHRCQLKELKDYGAAQDKKTREQLDHLYAEYIGQIPKDSKFDFTKDLKKLMDKSDLGQKIKDEIEAGDYLPKQRTSANGVIPHQMHQQELDQIIENQKEYYPWLAEPNPVEKNIKNAKYKLDQLVSFRVPYYVGPMITLADQQKTSKASFAWAVRKKAGKITPWNFYDMIDREKSANNFIKRMTNKDTYLLSEDVLPASSLLYQKFTVLNELNNIRVNGRKLQPALKQAIYTDLFQKRKTVNLKTLTNFLAIHEPTLTKPKIEGLSNGRSFNSSLGTYIDMSKILGDSLDDLNYRDDIEKIIEWSTVFEDSEIYGVKLQEIQWLTNEQREKLVRKRYQGWGRLSKKLLTGITDENGQRIIDLMWDTSKNFMQIVHQPVFEEQIAELNQQLLQDADKAPLEVVDDILADAYTSPQNKKAIRQVVKVVADVVKAVGNAPASISIEFARNEDRNKELKNSRRHSIEKLYHETAEKLVKQTNLLEELGNVKDLNDRYYLYFTQAGRDMYDGTPINIDEISTHYEIDHILPQSFLKDNSLDNRVLVKKSENAAKSDRVPAKLYGAKMRAFWKQLKESQLISNRKYLNLTTDPEQVDKYQMQGFVHRQLVETRQIIKLAANIFGSLYPDSAVIETRAELTKQLREKFSLYKVRDVNDYHHAVDAYLTAFAGHYLYQRYPKLRPMFVYGDYAKIYADDLKRLRSVNLFHDLEKDQYNSGTAVNPETKEKIVDVDWLSDYVSKIQHFKYMLISKAVYTQHGQLYGATILPVAQVDKISAPIGIKDDKPVDIYGAYTNEVAAYMAIVRVNGKKPKYKVVSVPVRMLQRLKMAEQKGHDQYMQTLHDVLLRNFTSLKKNRKTGLKEAVVKDFDVLVPCVRYNQLVIDGDTKFTLGSATYQHNAKQLVLCNHSLETLANNFEYVRKHPDEADERMIMLYDDILDQVNHYFTLYDKNKFREKLNAGRDKYLKLPTFSQFENNKKTAIGKSEAIINILRGLHANAAITNLKCLGVSTPFGQLQSPSGIELSENAKLVYQSPTGLFSREVLLKDL

SEQ ID NO: 507 - protein, 1382 aa, Lactobacillus pentosus
MKKIVNYNLGLDIGTSSIGYAAIDDQGRPVRHQNKTVMGVRLFKEGKTAESTRIFRGTRRRLSHRHWRLGYLDRIFDNEIAKVDENFLPRLKASKRARSDEKRSFRGSLLFPETGDDAYYQKYPTIYHLRYALITQKKQFDIRLIYLALHHMIKYRGNFLDTTPVSAFNIHDIDLTDQFASLNDCYQLLDMDFEFQFDLNNIEQVQKLLLDETLSKTKRQAAVSKVLVMSTGNKAFDDQQNGIASEFIKALLGGPFDLSKILNLSVADVKSWKLHMTDKDVDDTLNSLVEELDENHKQIVNLLQMIYSQVMMLGLLNGQQSISASMIERYDDHAKHWAALKKLLPALGEQEQSTIIHAYTAYTGHSRTKQLSRAEFYTKVNSILKKHENIAEATGLIELIDRNEFMPKQRDAVNGVIPHQLHQRELQLIIQNQQKYYPFLAAKAYPDADETMIEQLLSFRVPYYAGPLVDRDFINESSDQEQAMQNTKFSWLKRREAGEITPWNFEQKVDVQETANRFIKRLTTKDTYLMTEDVLPKESLIYQRFEVLNELNAIRINDRRLTAENKQLAFQQLFMAGNTKNVSIKKFRNFVFDSLKFPEKVKITGFAGQHNFLAKLSTYHDFKKIFGERVDHTDLQPDFERIVEWCTIFEDRHIYREKLKEIQWLSQSEIDQLVLIRNHGWGRLSKRLLTGIRDSDGRTVMDQLWFGTDNFMRIISQSDFAAAIANENRTQLNQHGLEDVLDSAFMSPQNKKAIRQVLKVVDDIEQTLGCPPKKVMIEFTRSPDKKKQRTVTRLEKVQQAYKAVADQLAGQSIVSELDQYANTHSKLSDTYYLYFMQLGRDLYSGKPIDIDSPMLDDDHILPRAFMKDNSLDNRALTEKPINNTKAAKFPSKVFGQQKEVTDFWKLLRRCGLMSNIKEKHLYLDPDNVDKWTRRGFIHRQLVETSQVIKIVANILNDRYQQSQTEVLEVPARLGTELRECFGWYKVREVNDYHHVFDAYLAAFIGNYLYRRYPKLQPYFVYGNFAELNKAQLKNIKSFNFLYNITDNKRVVKDIETGQTLWDDQIRQQIQHIYEYKYMLTSHEAFTQHKELYGQTIYPRREFKPGTLKAIKQDQPQELYGGYKNLTAAYMCIVKIQARKRRAAEYRVVRVATESLSALQQAKRLGVQAYERCLRQELVRNNEILRTNADPNSAPREFEVLLDRVLCHQMIISDGQKYLLGSHAYKINCMQLVLSNNSMKILSTSIVKLKQMTNEPLVQVYREILDVVNKYFTLYDVNSFRENLNQFFDKFRTLPITNEYESSKSGKKLIHRGQLETLTLILRGLHANSDKVQYGDQSTLLGGFQTKDGIKLSKDSVIQYTSPAGLNVRTVKLRDLEQKEAQK

SEQ ID NO: 508 - protein, 1361 aa, Lactobacillus pentosus
MNEPYGVGLDIGTNSVGWTVVDMNGRVRKVKGKTALGARLFKEGATAEDRRGFRTTRRRLKRVKWRLRLLREFFDQPISKIDPNFFARRKYSDISPRDPNYNGLAKTLFNDRTDKEFYDDYATIYHLRDKLMTSNRKFDIREIYLAIHHIVKYRGNFLRTGPASQYGSASLHLATSFQKLNDLFAQSEETLNLKLVTDEALLQQIQQILVRTDLSRSEQQRQIWPLMAVLTGASAAEKKRQKNVVVELSKALVGLKAKMNVVTLTEVDAAVVKDWTFTMEESQDKLPEIEEQLSEVGQQIMDEVIQLYASVNLAQLIPAGKRFSQHMVEKYKHHEKNLELLKAYIHSQSDSKRGREIRATYDRYIDGVDSKPVTQEMFYKDLMKYVEADATSNHLAAEIKDEIDSEQFMPKLRTKQNGSIPYQVQQYELDQIISHQKKYYPWLGEENPVAERRGKFPYKLDELVGFRVPYYVGPLITKEDQQATSGAGFAWMVRKADGPITPWNFDQKVDRIASATAFIQRMQTTDTYLIGEDVLPARSLIYQRFMVLNELNNMRVEDRKLAPQQKQRLYNQVFKQHQHVSVKNIQQNLMDAGEYRKTPQITGLADPKGFNSSLSTYHDFKKILLEAIADEHKRADIEKIILWSTTFEDSAIFKQKLEEVAWLTDAQRKQLSGLRYRGWGQLSHKLLTAFKDDKGRSIMDGLWETSDNFMQLRKQPAIETQIKEANQANLTDADIQDTINELYTSPQNKKAIREVMLVLDDIKNAMHGQTPSWIFVEAARGGGVAGRRTQSRSSQIVEAYKGTAKEIVSEKVQHELNEKIKAKADFNTRLVLYFLQNGRDLYTNEAINIDRLSEYDIDHILPQSLVKDDSLDNRVLTSARINREKNDTFASEKFGRKMGAQWRELHRNGLMTQRKLKHLLMRPDEISKHATDFINRQLVETRQVIKLVEELISSEYPAASIVAVKANLTHQFRQTFNFPKLREVNDYHHAFDASLTAFIGMYLLKQYPKLERFFVYGKFAKQPINLTRFNIIRKLAVAEKPIANIETGEILWDKTADIKYFEKLYNYKRLLVTHEVRENYGAMFKQTLFKASYNKSKTLVPKKNHMETSVYGGYSNQETAYLAIVRIPFKSGFKFIVVGIPTRMVAKIKHYQSLGATLNQATHKVIEPKFTKISRKTKQTVISDYEVVLPKVYLDQVVRDQVKGQMYRFSLGSDKEYHNVQELYLPLSIQQAFVGHYDESDDQRSNDLVKVYDAALKQLQRYFPLHLSRNFDQVASQAHQSFEGLKNNVQTSDKQLGKKEVLNSLFVGLHANATRSNLSVLGMSKDFGRIKSNGITLTDQAEIIYQSPTGLFERKVALKDL

SEQ ID NO: 509 - protein, 1358 aa, Lactobacillus pentosus
MNEPYGVGLDIGTNSVGWTVVDMNGRVRKVKGKTALGARLFKEGATAEDRRGFRTTRRRLKRVKWRLRLLREFFDQPISKIDPNFFARRKYSDISPRDPNYNGLAKTLFNDRTDQEFYHDYPTIYHLRDKLMTSDRKFDIREIYLAIHHIVKYRGNFLRTGPASQYGSASLHLATSFQKLNDLFAQSEESLNFKLVTDEAQLQQIQQILVRTDLSRSEQQRQIWPLMVVLMGATAAEKKRQKDFAKELANALVGLKAKLNVVTLTNVDTTVVKDWTFTLEESQDKLPEIEEQLSEVGQQIMDEVIQLYASVNLAQLIPAGKRFSQHMVEKYNHHEKNLELLKAYIHSQSDSKRGREIRATYDRYIDGVKSKPVTQEMFYKDLMKYVEADATSNHLAAEIKDEIDSEQFMPKLRTKQNGSIPYQVQQYELDQIISHQKKYYPWLGEENPVAERRGKFPYKLDELVGFRVPYYVGPLITKEDQQATSGAGFAWMVRKADGPITPWNFDQKVDRIASATAFIQRMQTTDTYLIGEDVLPARSLIYQRFMVLNELNNMRVEDQKLAPRQKQRLYNQVFKQHQHVSVKNIQQNLMDAGEYRETPKITGLADPKGFNSSLSTYHDFKKILPEAIADEHKRADIEKIILWSTTFEDSAIFKQKLEEVAWLTDAQRKQLSGLRYRGWGQLSHKLLTAFKDDNGRSVMDGLWETSDNFMQLRKQPAIETQIKEANQANLTDADIQDTINELYTSPQNKKAIREVMLVLDDIKNAMHGQTPSWIFIEAARGGGVAGRRTQSRSKQIVEAYKSTAKEIVSEKVQHELNEKIKAKADFNTRLVLYFLQNGRDLYTNEAINIDRLSEYDIDHILPQSLVKDDSLDNRVLTSARINREKNDTFASEKFGRKMGAQWRELHRNGLMTQRKLKHLLMRPDEISKHATDFINRQLVETRQVIKLVEELISSEYPSASIVAVKANLTHQFRQTFNFPKLREVNDYHHAFDASLTAFIGMYLLKQYPKLERFFVYGKFAKQPINLTRFNVIRKLAVAEEPIANIETGEILWDKTADIKCFEKLYNYKRLLVTHEVRENYGAMFDQTIFKATDSRKRLIQKKKGFATETYGGYTGRTLAYLAIVKVVTNKDTQYQVVGIPTTMVTQIQQLEASGLTSKQAVTKAIGAMINENNKKLQSYEVLLPKVRFEQVVRDEVKGHIHRFALGTDTYYHNIQELYLPLTIQRAFLGKRNDTDAQTEQNLLTVFETTLAQVNRYFPLYEMNKFKQILNSAQEKFAALPTKNKTVKNKLVTGKDGVLNNLFIGLHANASLGDLKILGMKIGFGKLQVPGGLKLTDQAEIIYQSPTGLFERKVALKDL

SEQ ID NO: 510 - protein, 1358 aa, Lactobacillus plantarum
MKEPYGVGLDIGTNSVGWTVVDASGHVRKIKGQTGIGVRLFKEGAAAADRRGFRTTRRRLKRVKWRLRLLREFFDQPISKVDINFFARRKYSDVSPRDPNYNGLEKTLFNDRSDQDFYHDYPTIYHLREALMTQHRKFDVREIYLAIHHIVKYRGNFLRNDAATAYRSGTLDLQQHFETLNHLFSQADLELNLNLTTDVALLDSIKQTLVRTDISRSDRQKLIMPLLAVLTGATTAEKKRQKAVVTEFAKALVGNKTKIDVLTLTDIDATEAKDWAFSLEENQDKLPGIEDRFSEVGQQIIDEVIRLYASVNLAQLIPEGKRFSQSMVEKYKRHGEDLKLLKAYIRSQSDAKRGRAIRATYDQYIDGVKSKQVTQEAFQKALGKFVDADVDLNSWAAQIKQAIDSEQFMPKLRTKQNGAIPYQVQQNELDQIISNQKEYYPWLGEENPVIKRRGKFPYKLDELFGFRVPYYVGPLITKEMQAATANAGFAWMVRKADGPITPWNFDDKVDRVASATAFIQRMQTTDTYLIGEEVLPARSLIYQRFMVLNELNNIRVDDGQLTPRQKQRLYNQVFKKHKRVTAKNIQDNLVAAREFPTAPRITGLADPKVFNSSLSTYHDLKQVLPEAMSDVRKQADIEKIILWSTIFEDSTIFKQKLTEISWLTAAQLKQLGQLRYRGWGQLLRKLLTGLKDDNNRSIMDGLWETNANFMQLRSQPAIENQIKSANQANLTTADLQDTINELYTSPQNKKAIREVMVVLADIKDAMHGQTPNWIFVEAARGGGVAGRRTQSRSKQIVAAYQGTAQAIVRDQVQRELKEKIKNKANFNTRLVLYFLQNGRDLYTGDAINIDRLSEYDIDHILPQSLVKDDSLDNRVLTNARINREKNDTFASEKFGKKMGAKWKEMHRMGLMTKRKLDHLLMRPDEISKYATGFINRQLVETRQVIKLVEELINAEYPSTAIVSVKANLTHQFRQTFDFPKIREVNDYHHAFDAALTAFIGTYLLKRYPKLERFFVYGKFAKQPVNLTRFNVIRKLAKTDTPITDIDTGEVLWDKLTDIKYFETLYDYKRLLVTREVSENYGAMFDQTLLKASDNGKRLIRKKQSFDTAIYGGYTGKTLAYMAIVKVSTKKDVQYQVVGVPTTMVTQIEQLEQQGMTNKQAVTKVIEPLIAANNKKMLTYEVLLPKVRFEQVVRDRIKGQTHRFALGTDTYYHNIQELYLPLTLQRAFLGKQNESEVQLNQNLLTVFDATLAQVNRYFPLYEMNKFKKILNSARDQIELLEAKNQFVKNKLVLGKQGILTNMFIGLHANASYGDLKVLGVKIDFGKLQVPGGIKLTGDAEIIYQSPTGLFERKIALKDL

SEQ ID NO: 511 - protein, 1361 aa, Lactobacillus rhamnosus
MTKLNQPYGIGLDIGSNSIGFAVVDANSHLLRLKGETAIGARLFREGQSAAERRESRTTRRRLSRTRWRLSFLRDFFAPHITKIDPDFFLRQKYSEISPKDKDRFKYEKRLFNDRTDAEFYEDYPSMYHLRLHLMTHTHKADPREIFLAIHHILKSRGHFLTPGAAKDFNTDKVDLEDIFPALTEAYAQVYPDLELTFDLAKADDFKAKLLDEQATPSDTQKALVNLLLSSDGEKEIVKKRKQVLTEFAKAITGLKTKFNLALGTEVDEADASNWQFSMGQLDDKWSNIETSMTDQGTEIFEQIQEHYRARLLNGIVPAGMSLSQAKVADYGQHKEDLELFKTYLKKLNDHELAKTIRGLYDRYINGDDAKPFLREDFVKALTKEVTAHPNEVSEQLLNRMGQANFMLKQRTKANGAIPVQLQQRELDQIIANQSKYYDWLAKPNPVEKHRASKPYQLDELLTFRIPYYVGPLITPKEQAESRENVFAWMIRKDPSGNITPYNFDEKVDCPASANMFIQRMKNTDTYLIGEDVLPKRSLLYQKYEVLNELNNVSIDGRRLGADQKQRLIREVFERHSSVTIKQVAENLVAHGDFAKRPEIRGLADEKRFLSSLSTYHQLKKILHEAIDDPTKEHDIENIITWSTVFEDAAIFKTELAKISWLDSDTIKALSNIRYRGWGQFSRKLLDGLKLGNGHTVIQELMLSNHNLMQILTDETLKTTMAELNQDKLKADDIEDVINDAYTSPSNKKALRQVLRVVEDIKHAANGQDPSWLYIETADGPGTAGKRTQSRQKQIQTVYANAAQELIDSAVRGELEDKIADKASFTDRLVLYFMQGGRDIYTGAPLNIDQLSHYDIDHILPQSLIKDDSLDNRVLVNATINREKNNVFASTLFASKMAATWRKWHEAGLISGRKLRNLMLRPDEIDKFAHGFVARQLVETRQIIKLTEQIAAAQYPNTKIIAVKAGLSHQLREELDFPKNRDVNHYHHAFDAFLAARIGTYLLKRYPKLAPFFTYGEFAKVDVKKFREFNFIGALTHAKKNIVAKDTGEIVWDKERDIQELDRIYNFKRMLITHEVYFETADLFKQTIYAAKDSKERGGSKQLIPKKQGYPTQVYGGYTRENTAYLAVVKTVEKKADVYRVVRIATSQVAALKEARAQSTVKERELLKKFLTTKFTKIGKNGKKAITPFDIVIPRVPREQLFHNKRYGFFMVNSDTLMHNYQELWMSRSDQQILSKLVKSAKTVENGQVGRLFENIVEQINKYFPLYDINQFRKKLDQSKDIFSKLPLEGNGTTSGKRETIQNILTGAGTGAKNGDLKNLGIKTPFGFLQVPSGIVLDDDTTLIYQSPTGMLNRIVRLSEL

SEQ ID NO: 512 - protein, 1361 aa, Lactobacillus rhamnosus
MTKLNQPYGIGLDIGSNSIGFAVVDANSHLLRLKGETAIGARLFREGQSAAERRESRTTRRRLSRTRWRLSFLRDFFAPHITKIDPDFFLRQKYSEISPKDKDRFKYEKRLFNDRTDAEFYEDYPSMYHLRLHLMTHTHKADPREIFLAIHHILKSRGHFLTPGAAKDFNTDKVDLEDIFPALTEAYAQVYPDLELTFDLAKADDFKAKLLDEQATPSDTQKALVNLLLSSDGEKEIVKKRKQVLTEFAKAITGLKTKFNLALGTEVDEADASNWQFSMGQLDDKWSNIETSMTDQGTEIFEQIQELYRARLLNGIVPAGMSLSQAKVADYGQHKEDLELFKTYLKKLNDHELAKTIRGLYDRYINGDDAKPFLREDFVKALTKEVTAHPNEVSEQLLNRMGQANFMLKQRTKANGAIPVQLQQRELDQIIANQSKYYDWLAKPNPVEKHRASKPYQLDELLTFRIPYYVGPLITPKEQAESRENVFAWMIRKDPSGNITPYNFDEKVDCPASANMFIQRMKNTDTYLIGEDVLPKRSLLYQKYEVLNELNNVSIDGRRLGADQKQRLIREVFERHSSVTIKQVAENLVAHGDFAKRPEIRGLADEKRFLSSLSTYHQLKKILHEAIDDPTKEHDIENIITWSTVFEDAAIFKTELAKISWLDSDTIKALSNIRYRGWGQFSRKLLDGLKLGNGHTVIQELMLSNHNLMQILTDETLKTTMAELNQDKLKADDIEDVINDAYTSPSNKKALRQVLRVVEDIKHAANGQDPSWLYIETADGPGTAGKRTQSRQKQIQTVYANAAQELIDSAVRGELEDKIADKASFTDRLVLYFMQGGRDIYTGAPLNIDQLSHYDIDHILPQSLIKDDSLDNRVLVNATINREKNNVFASTLFASKMAATWRKWHEAGLISGRKLRNLMLRPDEIDKFAHGFVARQLVETRQIIKLTEQIAAAQYPNTKIIAVKAGLSHQLREELDFPKNRDVNHYHHAFDAFLAARIGTYLLKRYPKLAPFFTYGEFAKVDVKKFREFNFIGALTHAKKNIVAKDTGEIVWDKERDIQELDRIYNFKRMLITHEVYFETADLFKQTIYAAKDSKERGGSKQLIPKKQGYPTQVYGGYTRENTAYLAVVKTVEKKADVYRVVRIATSQVAALKEARAQSTVKERELLKKFLTTKFTKIGKNGKKAITPFDIVIPRVPREQLFHNKRYGFFMVNSDTLMHNYQELWMSRSDQQILSKLVKSAKTVENGQVGRLFENIVEQINKYFPLYDINQFRKKLDQSKDIFSKLPLEGNGTTSGKRETIQNILTGAGTGAKNGDLKNLGIKTPFGFLQVPSGIVLDDDTTLIYQSPTGMLNRIVRLSEL

SEQ ID NO: 513 - protein, 1352 aa, Lactobacillus ruminis
MNDNFDLMRVKGKKGIGVRLYNEGQSAAERRMHRTARRRYGRRKWRLRLLEDFFDEHMAEVDDTFFARLKDSNISPKDDKKYRKSLLFPKSKGVTYQDDGEFYKKYPTMYHLRYALMTEHRKFDLREIYLAFHHMVKYRGNFLYDTSVDSFEAKNLDIKGKFDEINDLLSSYTDFYVDNSNAALVESILLEKNTTRKDKSKKIAKLLHVEDKEKGKNKKAKDLATQISNAVLGLKCNFHLIFELQQKYSFDLCSEKTEENIAKLSEVLDENQKMLLMILKEVQDQVMLNAFVPSGMSLSEAMMQKYDDYGEQLKIYHELEHSVSDDSAAKLRGAYRDYNDNIIKRIDGDNKKDTFYKRVKNILTKISKEYVDQDVLESCGKLKKLIDENKLFIRQRTAANGVLPHQLHQIEMRKIIDNQKEYYPWLAEPNPNEKRRVYSKYKVEELIAFRIPYYVGPLVDPNNADKNKEARFSWMVRKKDGEITPWNFYDKVDWAESANNFIERMKSKDTYLLGEDVVPKESMLYQKYEVLNELNNLRINDSGLSDSFEDVKLKQAIYNDLFKKQKIVKITDLQNYLVQNHKYLVKPKISGLADENRFLSSLSTYSDLKTIFGDKVDDRTYFNDFEKMVEYSTVFEDGHDYNQKLDEYTWLTKEEKYKIGKKRYRGWGKLSKKLLTGLRDKNNHTIMDNLWETNRNFMQIQTADEFSKQIAEENERHLKGSVSDAINDMYTSPANKKAIRQVLRVVDDIQKAMGYAPSSISLEFAREDGPSVRTVSRANRMKSIYEKYASEVSEEVMKDLDGVIKDKKGLNDRLYLYFEQQGKDMYSGHPLDFDKVISGQEYDIDHILPQAVIKDDSLDNRVLTTKALNNDVKSKGVPCRMFNGMHSFWKNLYDKGFISRRKFNNLTTNPENIDKYKMKGFVNRQLVETRQIIKLVANVLNDKYQNDDVDIIEVRAELTHDVRKHFKFYKNRNVNDYHHAFDAYLTSFIGHYLFKKYPNLRPLFDYNDFMKVSDNVFKQLRGNNFLGEFLNKTGDIISTDGNFVLNKEEMINKLNKAYAFKKILVTKEVGQRTGAMFNETRYPAPNSRKAALKYRRMPKPDSLISVKDYKNTDIYGGYSGKNDAYMVIVDMGKQYMVVGVPVRYTEKLDKLRIKHSELYRDELRKVLSRDKTLLDSKGNVKRFDIVLDRVLYGQLIEDGNELFTLGSSKYKRNFRQLFLDKQCIEILDSSATPQPTDEELIWVYDQILDKVDKYFELYDINRQRETLRKGRAAFCSLPNISMKKDDVTKKKILNEILVALHANESESNCEKIGKKVFGRLQVPGGIKLSKEAKLIYQSPTGLFERVVYLKDL

SEQ ID NO: 514 - protein, 1339 aa, Lactobacillus salivarius
MERYHIGLDIGTSSIGWAVIGDDFKIKKKKGKNLIGTRLFNEGATAAERRGFRTQRRRLNRRKWRLKLLEEIFDPYMAEVDEYFFARLKSSNLSPKDSNKKYLGSLLFPDKSDSNFYDKYPTIYHLRRDLMEKDEKFDLREIYLAIHHIVKYRGNFLEKVPAKNYKNSGASIGFLLEEVNSLYKDIIGDESIAILNSEKFEDVEKIILDEETRNLDKQKSVGKLLVEDKKKKNIVTAFSKAIFGYKFNIEDLLLIENDEKNKLTFNDENIDDIFNELSHSLDDKQMDLLTKTREIYFKFKLNMIVPTGYTLSESMIEKYEMHKAHLKMYKEFINTLNTKDRKILKNAYSDYINTEKAKAANAQENFYKTVKKIIKDNNSDTAKKIIVLIDEGNFMPKQRTGENGVIPHQLHQIELDRIIENQAKYYPWLAEANPVEKNRKFAKYKLDELVTFRVPYYVGPLIDKTESNKNEKETKFAWMVRKAKGTITPWNFENLVDRTESANRFIKRMTSKDTYIIGEDVLPASSLLYEKFKVLNELNNIKVNEKKLDIEQKQDIYLNLFTTAKNVTKKSLATYLNCSADSISGLSDGEKFNSSLSSYIDLKAILGNIVDDCNKNEDLEKIIEYSTVFEDGNIYKEKLSEISWLTDEQIEKLSNIHFKGWGRLSKKLLTQITNENGERIIDALWNTSNNFMQIINDESIQAKLAEINGKYAGKSDLEDILSEAYTSPQNKKAIRQVMKVVEDIEKAMQCEPTSISIEFTRKKQKSRLTNTRYKKISDVYEKIADEVISEYELRKLQSELDSNANNMRDRYYLYFMQLGRDMYTGEKINIDELHQRYDIDHILPQSFIKDDSINNRVLTRKDVNNKEKSDKTAADLYAVEMSDFWRKLRKQGLITEQKYKNLLTKSDSIDKYAKKGFIKRQLVETSQVVKLVANILQDKYSDTKIIEVRAKLNSNLREEYKLIKNRAVNDYHHAIDGYLTTFIGQYLYKTYPKLRSYFVYNDFKKLDSNYLKHMKKFNFLWQLQDDKTIDIYDNVNNKFVLNVPEMKKYIQKIYNYKYMLVSKEVTTKNGAFYDQTKYNAKTVNLIPIKKNKPTNIYGGYKGKVSSYMMLVKIRKKKEVIYKFVGVPRLWTDELDRLKDTTERKILLNEIAKNSLSKTEQDFEVILDKVYYGQLIIDGNQKYTLGSSEYKYNAMQLHLSKHALEVLAKENVKDAEITDKDLVSVYEEILSVVNKYFELYDINKFRQKLNEGLEIFRKLPVYNVYESNKIKQVGKFEVLNRILMGLHANAMITDLKVLGIKTKLGQMQVNGGIKLSPDAKLIYQSPTGIFSRAVRVKDLG

SEQ ID NO: 515 - protein, 629 aa, Lactobacillus salivarius
MERYHIGLDIGTSSIGWAVTGDDFKIKRKKGKNLIGTRLFKEGNTAAERRGFRTQRRRLNRRKWRLKLLEEIFDPYMAEVDEYFFARLKDSNLSPKDSNKKYLGSLLFPDISDSNFYDKYPTIYHLRRDLMEKDEKFDLREIYLAIHHIVKYRGNFLENVPAKNYKNSGASIGFLLEEVNNLYKDIVGDENVTILNSEKFEDVEKIILDDGIRNLDKQKGVGKLLVEDKKNKNLVTAFSKAIFGYKFNIEDLLLVEGDEKSKLTFNDENIDDIFNELSHSLDDRRMDLLTKTREIYFKFKLNMIVPTGYTLSESMIEKYEIHKAHLKMYKEFINTLNSKDRKILKNAYTDYINNEKAKAANAQENFYKTVKKTIKDNDSDIVKKIIDLIDEGNFMPKQRTGENGVIPHQLHQIELDRIIENQAKYYPWLAEENPVEKNRKFAKYKLDELVTFRVPYYVGPLVDKTESNKNEKETKFAWMVRKSKGTITPWNFENLVDRTESANRFIKRMTSKDTYIIGEDVLPASSLLYEKFKVLNELNNIKVNEKKLDIEQKQNIYLKLFTTTKNVTKKNLATFLNCSIESISGLSDDKKFNSSLSSYIDLKVILGDIVDDYSKNEDLEKIIEYSTIF

SEQ ID NO: 516 - protein, 897 aa, Lactobacillus salivarius
  misc_feature (822)..(822): Xaa can be any naturally occurring amino acid
MLIESDEKNKLTFNDENIDDIFNELSHSLDDNQMDLLTKTREIYFKFKLNMIVPTGYTLSESMIEKYEMHKAHLKMYKEFINTLNAKDRKILKNAYSDYINNEKAKAANAQENFYKTIKKTIKDNNSDTAKKIIGLIDEGNFMPKQRTGENGVIPHQLHQIELDRIIENQAKYYPWLAEENPVEKNRKFAKYKLDELVTFRVPYYVGPLVDKTESNKNEKETKFAWMVRKAKGTITPWNFENLVDRTESANRFIKRMTSKDTYIIGEDVLPASSLLYEKFKVLNELNNIKVNKKKLDVEQKQHVYLDLFTTRKNVTKDNLATSLNCDVESITGLSDNEKFNSSLSSYIDLKAILGNAVDDCNKNKDLEKIIEYSTIFEDGNIYKEKLSEISWLTDEQIEKLSNIHFKGWGRLSKKLLTQITNENGERIIDALWNTSNNFIQIISDESIQAKLAEINGEYADKSNLEDILDEAYTSPQNKKAIRQVMKVVEDIEKAMKCKPTSIAIEFTRRKGKSKLTNTRYKKISETYEKITDELISEYELGKLQSKLDSKANNMRDIYYLYFMQLGRDMYTGEKINIDELHQYYDIDHIFPRSFIKDNSLNNRVLTRKEINNNEKADRTAADLYAVKMGDFWRKLRKQGLITEKKYKNLLTRTDSIDKYTKQSFIKRQLVETSQVVKMAANILQDKYSNTKIIEVRARLNSDLRKEYELIKNREVNDYHHAIDGYLTIFIGQYLYKTYPKLRSYFVYDDFKKLDSNYLKHMDKFNFIWKLEDKKAEDVYDNVNNEFILNVPKMKDYIQKIYNYKYMLISKEVTTESGAFYXZTKYNAKTINLIPIKKDKPTNIYGGYKGKVSSYMMLVKIQKKKEVIYKFVGVPRLWTDELDRLIDTDEKKALLKK

SEQ ID NO: 517 - protein, 1419 aa, Unknown
  Lactobacillus sp.
MAKPQNYTIGLDIGTNSVGWTVTDDQNNILRIKSKKAIGARLFEEGKVAAERRSFRTTRRRLSRRKWRIKLLEELFDEEISKVDPNFFARSHESWISPKDKRERYSAIVFPTPEEDKKFHNEYPTIYHLRDRLMKDDQKHDIREIYVAIHHIMKYRGNFLHDESIETYRSGMSSLGGGDERTILNTKILDDLNDAFADNLATQGISVNSASADQINEIVTSGHLNVDSQKAIAKLLLPTTLSSDDKKQDKKIKKLATDAAKNVASAWLGYKANFAAILNIQEVDKDKKKIYSFALQGADEEDKVETLESVLSQDQIEIVDRIIRIRHAIVLGEIIPVGMTLSEAMIEKYDQHAKDLKNLKTVIRNLKDRKNAVKLQAIYDLYVNNRHADTAKAMKLAGVKKRTELLEPEEFNKSIEKLLDDSPVSAEIKKRIAEKDFLPLQRSNSNGVIPNQLHQIELDEIIKKQSKYYPFLGETNEHASADVARKAPTKLDQLLTFRVPYYVGPLITKEEQEEQDGHSFAWMIRKNPKDHEKITPWNFDEKVDRMASATQFIKRMTTKDTYLLGEDVLPSSSLKYQLFTVLNELNNLRINHKKLTREEKEQVIEDLFKKYKTVKADKFKNYWQKGHAGLDVKIQGMADPEKFNSTMSTYIDLQKIFGDQLDDAQRQNDFEKIIEYSTIFEDRKILGEKLRADFVWLSEDQIKRLCRLRLQGWGRLSLKLLTRLTDADGQNVLERLLNSNDNFMQIVKDPVIKAKIEQKNQKLLRADWSENATESILDEAYTSPQNKKAIRQVMRVVHDIVKACDGNLPAKFAIEFARSQDDDPKRTVARADRLQKIYAQISDEVVSQGVKDQLSGMKSLKDRYYLYFMQGGRDAYTGKPLNIDRLSDYDIDHIMPQSFIKDDSLDNRVLVTRAVNNQKSDNVPVLLYGNHLVADLGITIREMWDRWQKSGMISKRKLANLLTDPATLSEYRAEGFINRQLVETSQVIKLTATILQSEFPDSKIIEVPAKYNSILRKQFDLYKSREVNDYHHAIDAYLSTIVGNYLYQVYPNLRRLFVYGEFKKFSHGEEESSHQAVRRVKSMNFLDDLLRGKHGDDIYCRVTGEVIFSRKDIISKLKQAYSFKQMLVTQEVFTKKSALFDQTVYPSPARDSKTRSGLIPRKQGMDTEIYGGYSGNKDAYFVLAQVVKSKGHTLQVVGVPIRALRALANCSNYSEQLLKIVKAQVLFNKKTGKAKKGISDVRILLDKIPYRQPVLDGSAFYMLGSSTYKYNLKQISLSQQSMKYILDYIDDPNFNKHEMTKIDQQNEKECLLSVYDEILDKMDKYLSLYDINGFRKKLHVGRDKFIKLEVEKQAEAIKNVLRGFHANSDMTKLSDLGLSTSLGFMQASDGIKLSDNAVFIYQSPTGLFERRVKVSDLLK

SEQ ID NO: 518 - protein, 1289 aa, Lactobacillus versmoldensis
MRRRYRRRRNRLNWLDELFADELAKIDPSFLLRMKNSWVSKKESTRKRDPYNLFIDEKYNDVDYFNQYPTIFHLRKELITEDKKVDIRLIYLAIHNIIKYRGNFTLENQNFDISQLSSNFSQQISDFFALFSDFGVIMPEDFDPDKISDILLNPNLSPSGKVSEAIATISPKTNVKAKIKIILLLLVGNNGDLKKLFDLETTEKIAVKLSSRHIDSELPIILSELNEQQENIITIANSIFGSIILKDFLGDETSISAAKVISFEDHKQDLQKLKTMWRETSNKEAVKAGKKAYEDYIGHEDSETFYKKIKKFLEKAQPVDLANKALAEIELENYLPKQRNRNNTVIPYQLNENELIAILDHQEKYYPFLKENRDKILSLLTFRIPYYVGPLQDSNNNRFSWMTRKASGAIRPWNFSEKVNVEQSSNDFIKRMRSTDTYLIGEPVLPKKSLIYQCYEVLSELNNTRVKDGSSNPKRLDVTIKQRIYNEIFKNQKSVSVKVLQNWLIKESYFKSPEISGLADKKKYLSSLSTYIDFKKIFGQRFVDDPVNSPQLEELAEWLTLFEDKKILLIKLQNSKYSYDQATINKLSTMRYQGTGKLSKKLLVDLKTTKKSIGKSGAESLSILDLMWSTKDNFMQIIHDADYTFEQQIKEFNYDTEDELTPLEKVANLHGSPALKRGLNQSIKVVADIVKFMGHDPEKIFIEFTRSDDFSKLTISRYRRIKKQYLEIAKAIKKIPAEFKDIKEYQTQLEENKGKLASERLMLYFLQCGHSLYSNKPIDLNMINSSKYHVDHILPQSYIKDDSLENKALVLASENENKIDNMLISHDIIATNLPRWQALKDQNLMGSKKFADLTRTTVTENQKKGFIQRQLVQTSQIVKNITLILNDLYKNTSCIETRATLSSEFRKAFSNFDETTYHYQFPEFVKNRDVNDFHHAQDAFLACVIGEYQLKKYPKDNLRLVYDQYSKFLDSLKKDTRKKNGRMPRYTQNGFIIGSMFNGKTYVDDNGEIIWDQKIKESIRKTFNYHQFNVVRQTIEQHGKLFNDTIQPHSDRYKLIPLKTNRDPAIYGGYNNDNNAYSVVLDVDGKKKINGIPIRIANQLKSDELDLSSWLENNIKHKKPMTILIDKVPKYQRIINEETGDLLITSANEVINNVQLFLPSMYTALISLLDSTKTEMYSKLLSNYEANILIDIYDYLLTKLKNNYPLYRKEWAKLAEHRDDFIESDLVTQASTLQQLIKFMHADPSNVNLKFGNFKGNRFGRKNGNIKLSKTDFIYESPTGLFKSIKHID

SEQ ID NO: 519 - protein, 1372 aa, Legionella pneumophila
MESSQILSPIGIDLGGKFTGVCLSHLEAFAELPNHANTKYSVILIDHNNFQLSQAQRRATRHRVRNKKRNQFVKRVALQLFQHILSRDLNAKEETALCHYLNNRGYTYVDTDLDEYIKDETTINLLKELLPSESEHNFIDWFLQKMQSSEFRKILVSKVEEKKDDKELKNAVKNIKNFITGFEKNSVEGHRHRKVYFENIKSDITKDNQLDSIKKKIPSVCLSNLLGHLSNLQWKNLHRYLAKNPKQFDEQTFGNEFLRMLKNFRHLKGSQESLAVRNLIQQLEQSQDYISILEKTPPEITIPPYEARTNTGMEKDQSLLLNPEKLNNLYPNWRNLIPGIIDAHPFLEKDLEHTKLRDRKRIISPSKQDEKRDSYILQRYLDLNKKIDKFKIKKQLSFLGQGKQLPANLIETQKEMETHFNSSLVSVLIQIASAYNKEREDAAQGIWFDNAFSLCELSNINPPRKQKILPLLVGAILSEDFINNKDKWAKFKNFWNTHKIGRTSLKSKCKEIEEARKNSGNAFKIDYEEALNHPEHSNNKALIKIIQTIPDIIQAIQSHLGHNDSQALIYHNPFSLSQLYTILETKRDGFHKNCVAVTCENYWRSQKTEIDPEISYASRLPADSVRPFDGVLARMMQRLAYEIAMAKWEQIKHIPDNSSLLIPIYLEQNRFEFEESFKKIKGGSSDKTLEQAIEKQNIQWEEKFQRIINASMNICPYKGASIGGQGEIDHIYPRSLSKKHFGVIFNSEANLIYCSSQGNREKKEEHYLLEHLSPLYLKHQFGTDNVSDIKNFISQNVANIKKYISFHLLTPEQQKAARHALFLDYDDEAFKTITKFLMSQQKARVNGTQKFLGKQIMEFLSTLADSKQLQLEFSIKQITAEEVHDHRELLSKQEPKLVKSRQQSFPSHAIDATLTMSIGLKEFPQFSQELDNSWFINHLMPDEVHLNPVRSKEKYNKPNISSTPLFKDSLYAERFIPVWVKGETFAIGFSEKDLFEIKPSNKEKLFTLLKTYSTKNPGESLQELQAKSKAKWLYFPINKTLALEFLHHYFHKEIVTPDDTTVCHFINSLRYYTKKESITVKILKEPMPVLSVKFESSKKNVLGSFKHTIALPATKDWERLFNHPNFLALKANPAPNPKEFNEFIRKYFLSDNNPNSDIPNNGHNIKPQKHKAVRKVFSLPVIPGNAGTMMRIRRKDNKGQPLYQLQTIDDTPSMGIQINEDRLVKQEVLMDAYKTRNLSTIDGINNSEGQAYATFDNWLTLPVSTFKPEIIKLEMKPHSKTRRYIRITQSLADFIKTIDEALMIKPSDSIDDPLNMPNEIVCKNKLFGNELKPRDGKMKIVSTGKIVTYEFESDSTPQWIQTLYVTQLKKQP

SEQ ID NO: 520 - protein, 907 aa, Leptospira inadai
MAKSIEEIRSIQNEFVVEYSILLKKIKKGEIDKKNDVYKVYQNTIKSSERLEQVLKERLGFQNVSKSYFNNPYSIAQLYNLISVDRSGFSKVCRSCQEENHWRSTLIDTDRGPQAQASKQVSDTGRPFDGQLAMLLDRIAFEIVKLKRIEIERLLSNKNSSKIEVVEIPLLIEENSFNFRYELAELKKLSKKKKDQLKKSVEEFDTKLNSKQERIKAASRELCPYTGKKISKGEIDHILPRSWTQKQFGTALNAEANLIYASREGNQSKGNREYGLNDLDEKYLNIIFGTKEVDSIQRNISDTIDRLDIERGTTRIVFDRLAPNERDCLRHALFIKSLRPKVFELLSGQLKARVNGTQLYLAKRIRSLLLKNQDFITKSLIIKVPSFSFYEPRTVDLPYMRKELAEKFPNLGKQNPQPTGSHIIDAAMVMAYAVETDSGNLSFGSKDKSEGFDSESLSRFLPSNIQFLSIKSKDKTDSKYPYKKPLFKDGVFGERFLPILIAEKGLRVGYTLENSLEVNSENPEEFFNVLKPYLLFKRKPIESNYQTLVAFAQKDKRGYIVLPVNKPKALESISQRKSDPHTSILKNILYTVSRESIPSLIFDKNTLIPEIKSNKVNWGDKLEKKFRIKIEIKLYGKKIADGFIRYPGKTEWEKLLLTEPLKGLVKNKTLTPKWFDSLENLAGLDDHFKDTSNPEAKHKRKSNHYALPVPKGPSGGFRIRRNSFDGYKVYQLYSVDGNSFHAFKIENGWTGKTLLLDIYQNSGNLHSLDYDYENTDISQTALFSKFYKIEFSKEETQKINSKGIKSLYVAPGSSSRQYIRVIFDKQTFSKFIKFQSKFWEFDLITPLPKDKAKDLIESILKIFPEDLRPKKPRNDIHIQNISHDSVQVEYIADGKTQGFGQYFINQN

SEQ ID NO: 521 - protein, 418 aa, Leptospira inadai
MILKSPIAIDLGAKNTGIVYTTYQPNALPTEIHGATIISDNLKLSQVDRRAKRHQRRNYTRMKLARRLVYLIIRYHYRIPEQDLTPEVKTSLQSLLTRRGYTFQSIETEGNELGQAPWGEIEDYFPNVQDYEKSLPIQTVLYHFFSSENLELNKLVPSKEPETKEDKNILKYIREQKEAFESEQNNGARHRLKYFEEIKEDFPRKIKLMECLQKNKIEEKKFLNLIQNISNLQIKPLRAYFNDKDMKEKEIWEPRRLHTYIARWIRSWHIDPKNSSKRLIRQKLLSQLENGKLKIIRDTSIYSPSKDIISFLEEIDPKDTIPPYEDQNNRHPPRCQNLWLDGKILDRYFPGWEQSLWKLIRNEKNNPFEQLITKDFRTDDTISEGKSLSEQIQIYERSHSNIKLDVRAVILQRFLDRS

SEQ ID NO: 522 - protein, 125 aa, Leptospira inadai
MSAYDRSANLDPWSLRLQGKAKKEIKTTESLSKTDLQKASDAYEKIKEILSESDTDQFIKLANRYYLEVADIKKGMWLPTAPERKHKEIPKSIAHEENQDISLFHKCNTKTGSKKRISQVSLEMF

SEQ ID NO: 523 - protein, 1355 aa, Leuconostoc gelidum
MTYSIGLDIGTGSVGWAVIGDDYRLKRAKGKNLIGVRLFDSATTAAERRGYRTTRRRLSRRHWRLRLLNDIFASDLAEQDENFLPRLKYSWVNPDDEQNPQLNSDVANGALFGSSETDKAFHKNYPTIYHLRHELMTDTAKHDLREVYLAIHHIVKYRGNFLNTADKINAENSFNVDLFIAALDEYNEFLETPITSIKDAQLFSDKLTDINARNKSVRVENAMSETYDDKSKIFKAILTALVGNTANFQTIFDLSDLEKDEAKNFKFKLDLEDVETKLDVVRAKLSDEQNAFLEAVLIAYDGITLKMILGDYKSISQSMIESYKSHQRDWKYIKNNVRLNEQKIEPDKNSVKFFKLDPKKLIYPSNLAYLQVISSNEDEHRKGLDYFKTAIQDADILQRIENDTFLPRQRTKRNGVLPYQLHLAELEQIIKKQSKYYPFLANIYTQDNKTENKLIGLLKFRVPYYVGPLVEAEKVTGDGKNHWLIKKELQENTPITPFNFDDVVDKDKSGEQFIKRITGTDSYLIGEPTLPENSLLYQKYNVLQELNNVRNERHQRLPIKVKQDIFEHVFKIDKNVNAKKVMAYLKLNGYGDFQIAGLSDTRTGKFNSNLSSYNYFVDLLGREKTEKIREDRLEEIIEIQTVFEDKILVAKRLSNLDFLTPQEKSKLSAKHYTGWGRLSQKLLTTQFIKTALSEAGDIIPQSHSIIDLLYYTDKNLMEILNDKTFNVRNWLTEQNKGTESGNSLYDQIDALAGPKDIKRGITQVFSIIDDIKKAMGSNPETVYLEFARETQTSRLTNSRLNRVQEIYNSPELKTEFAYLAKKLEAETKESIHDDRLYLYYLQEGRDMYTGKEIPFDQISSNYDIDHIIPQAFTKDDSLDNRVLVNRATNARKSNSPTFTNDIIDNRKSWWQSLVKRGLMSKEKFERLTDKRKTFSENQTNHFIARQLVETRQIIKNVADLIKNNYDGTQAVAIRASLTGEMRRYLDWPKNRDMNDYHHAHDALMMATVGKYVDRRGFFDNGSVSDGAGNAYNLYTKDWLVAARVGTRNDSQRVNPYGFIVGSMNSKAVRQQVNKETGEIVWGNENLDYLRHVLSYKKILVTRRLSGSSGRLYAETLFSPNPKAKLIAQKANRSVALYGGFTKAESAYTALVEFNKKGDRSYKLIKVPMAIANRVNDKQITVTAYIASLNLRDFSRVVLEHLPLGTLIRESDGSEFYAASSEYKHNAKELWAPKEILRSSKKLDKATADNLIDIFDFLTNDKTISNFKFYEKDLLHLKNVRDKFVEASDEIKIKVLSDVIYELHNDAGWRDPFKHIQEKPAWTMLQVKGGIKLSEKAAIVYQSPTGLFETITIVGE

SEQ ID NO: 524 - protein, 883 aa, Leuconostoc pseudomesenteroides
MIGVRLFEGADTAAERRGYRTTRRRLSRRRWRLRLLNDIFASELSKIDENFLPRLKYSWVNKNDTDNVHFGVGVFDNSEQEKAFYQDYPTIYHLRQKLMTDNRQHDLREVYLAIHHIVKYRGHFLNSGEISANSSFDAQKFLELLREFDNTFYPDAVKFLNLDQLDLPDKISSEISDSKISKSERVDRVLQHVQLANSGAKKILKAILNAVVGNSVDSVAMFSLSDLDKEEKKKINHPVTDSKPFKYSDKEVEAKLDELSNLLQDEQKIEFLSLLKLSFDGLTLKMLLGNAKSVSEAMVERYKVHKDDLKFIKENILNSFSKDKKKEFDKYYEAHLAEKDVDNVDKYFKKIIDDSIISKDKKIELLQKIDDHDFLPSQRSKINGAIPHQLHRNELDKIISQQSKYYPFLADSYTQNGKTETKLAGLVNFRVPYYVGPLVSKENADRNNPDGGQNHWVEFKENTSLSNLTPWNFNEIVDKDKSAAKFIERLTGMDTYLIGEPTLPQNSLLYQKYNVLQELNNIRVDNHKLDVKIKQDVFEHLFKTQNSVSAKDVKNYLIANGYAAPSIQITGLSDTNEKTFNSKLSSYNYLVDKLGRTFVESVKSDVLEKIIELQTVFEDKTVLLRQLSMISELTLAQANQLAEKHWTGWGRLSRKLLSSKVVDVNKITNSTFYPATSRQTIIDTLYHTQLNLMEIINNAEDLYGVRQWISEQNKSDSSDTNDVYDQIQELAGDKKIKRGITQSFRILDDIVKAMGGEPERVYLEFARENQQSGVSFSRKNLLSKLYENDSLKQTFKELKSQLESETKENLQNDRLYLYYLQQGRDMYSNDELNIDQLSSYDIDHIIPQAYTKDNSFDNRVLVSSKANRLKRMLLWYPVKLSKK

SEQ ID NO: 525 - protein, 468 aa, Leuconostoc pseudomesenteroides
MKDQGFISKRKFENLTRRGDFSEQQKERFIARALVETRQIIVNVSSLIDSHFNHTKAVAVKSNMTTDMRHYTKVPKNRDINDYHHAHDALFVATVGQYIENKGFMKAGKLSDSVGNEYNRYTKKWIETARKNTNYGRVNPFGFVVGSMQTATRGKLDYETGELKVVKNNYWSKDDLDYLLKVVSYKKILVTTKLQDNKGAMYDANLISAKGSGKKKAQLQISKSKNIDLYGGFNKLQNEYSVLILNHDEYRWLSIPMYARNSSEQYLHDKYPDAKVILNHILVGQPILLSNSSDPQKSKFASLRIATGGDYHNNFEFVPSVDVKKILDNIYLNHSVTDDEYKKVFESLLATLHDKFVFGIHQVMYNKIFDNKYLFDKMPDEAKRNVINSLLKFMNISKNQLGAVGKIGGKVNGVLYGFKTETEKGTSAGQLISNGKMQPHDIFIFQSPTGIFERRVTVAELANVIKDE

SEQ ID NO: 526 - protein, 1103 aa, Listeria innocua
LKLYPGEKSTGMFAQFISLIVGSKGNFQKPFDLIEKSDIECAKDSYEEDLESLLALIGDEYAELFVAAKNAYSAVVLSSIITVAETETNAKLSASMIERFDTHEEDLGELKAFIKLHLPKHYEEIFSNTEKHGYAGYIDGKTKQADFYKYMKTTLENIEGADYFIAKIEKENFLRKQRTFDNGAIPHQLHLEELEAILHQQAKYYPFLKENYDKIKSLVTFRIPYFVGPLANGQSEFAWLTRKADGEIRPWNIEEKVDFGKSAVDFIEKMTNKDTYLPKENVLPKHSLCYQKYLVYNELTKVRYINDQGKTSYFSGQEKEQIFNDLFKQKRKVKKKDLELFLRNMSHVESPTIEGLEDSFNSSYSTYHDLLKVGIKQEILDNPVNTEMLENIVKILTVFEDKRMIKEQLQQFSDVLDGVVLKKLERRHYTGWGRLSAKLLMGIRDKQSHLTILDYLMNDDGLNRNLMQLINDSNLSFKSIIEKEQVTTADKDIQSIVADLAGSPAIKKGILQSLKIVDELVSVMGYPPQTIVVEMARENQTTGKGKNNSRPRYKSLEKAIKEFGSQILKEHPTDNQELKNNRLYLYYLQNGKDMYTGQDLDIHNLSNYDIDHIVPQSFITDNSIDNLVLTSSAGNREKGNDVPPLEIVQKRKVFWEKLYQGNLMSKRKFDYLTKAERGGLTEADKARFIHRQLVETRQITKNVANILHQRFNYGKDDHGNTMKQVRIVTLKSALVSQFRKQFQLYKVRGVNDYHHAHDAYLNGVVANTLLKVYPQLEPEFVYGDYHQFDWFKANKATAKKQFYTNIMLFFAQKDRIIDENGEILWDKKYLDTVKKVMSYRQMNIVKKTEIQKGEFSKATIKPKGNSSKLIPRKTNWDPMKYGGLDSPNMAYAVVIEYAKGKNKLVFEKKIIRVTIMERKAFEKDEKAFLEEQGYRQPKVLAKLPKYTLYECEEGRRRMLASANEAQKGNQQVLPNHLVTLLHHAANCEVSDGKSLDYIESNREMFAELLAHVSEFAKRYTLAEANLNKINQLFEQNKEGDIKAIAQSFVDLMAFNAMGAPASFKFFETTIERKRYNNLKELLNSTIIYQSITGLYESRKRLDD

SEQ ID NO: 527 - protein, 1337 aa, Listeria innocua
MKNMKKPYTIGLDIGTNSVGWAVLTDQYDLVKRKMKIAGDSEKKQIKKNFWGVRLFDEGQTAADRRMARTARRRIERRRNRISYLQGIFAEEMSKTDANFFCRLSDSFYVDNEKRNSRHPFFATIEEEVEYHKNYPTIYHLREELVNSSEKADLRLVYLALAHIIKYRGNFLIEGALDTQNTSVDGIYKQFIQTYNQVFASGIEDGSLKKLEDNKDVAKILVEKVTRKEKLERILKLYPGEKSAGMFAQFISLIVGSKGNFQKPFDLIEKSDIECAKDSYEEDLESLLALIGDEYAELFVAAKNAYSAVVLSSIITVAETETNAKLSASMIERFDTHEEDLGELKAFIKLHLPKHYEEIFSNTEKHGYAGYIDGKTKQADFYKYMKMTLENIEGADYFIAKIEKENFLRKQRTFDNGAIPHQLHLEELEAILHQQAKYYPFLKENYDKIKSLVTFRIPYFVGPLANGQSEFAWLTRKADGEIRPWNIEEKVDFGKSAVDFIEKMTNKDTYLPKENVLPKHSLCYQKYLVYNELTKVRYINDQGKTSYFSGQEKEQIFNDLFKQKRKVKKKDLELFLRNMSHVESPTIEGLEDSFNSSYSTYHDLLKVGIKQEILDNPVNTEMLENIVKILTVFEDKRMIKEQLQQFSDVLDGVVLKKLERRHYTGWGRLSAKLLMGIRDKQSHLTILDYLMNDDGLNRNLMQLINDSNLSFKSIIEKEQVTTADKDIQSIVADLAGSPAIKKGILQSLKIVDELVSVMGYPPQTIVVEMARENQTTGKGKNNSRPRYKSLEKAIKEFGSQILKEHPTDNQELRNNRLYLYYLQNGKDMYTGQDLDIHNLSNYDIDHIVPQSFITDNSIDNLVLTSSAGNREKGDDVPPLEIVRKRKVFWEKLYQGNLMSKRKFDYLTKAERGGLTEADKARFIHRQLVETRQITKNVANILHQRFNYEKDDHGNTMKQVRIVTLKSALVSQFRKQFQLYKVRDVNDYHHAHDAYLNGVVANTLLKVYPQLEPEFVYGDYHQFDWFKANKATAKKQFYTNIMLFFAQKDRIIDENGEILWDKKYLDTVKKVMSYRQMNIVKKTEIQKGEFSKATIKPKGNSSKLISRKTNWDPMKYGGLDSPNMAYAVVIEYAKGKNKLVFEKKIIRVTIMERKAFEKDEKAFLEEQGYRQPKVLAKLPKYTLYECEEGRRRMLASANEAQKGNQQVLPNHLVTLLHHVANCEVSDGKSLDYIESNREMFAELLAHVSEFAKRYTLAEANLNKINQLFEQNKEGDIKAIAQSFVDLMAFNAMGAPASFKFFETTIERKRYNNLKELLNSTIIYQSITGLYESRKRLDD

SEQ ID NO: 528 - protein, 953 aa, Listeria ivanovii
MKKMLANIDGADYFIDQIEEENFLRKQRTFDNGTIPHQLHLEELEAILHQQAKYYPFLRKDYEKIRSLVTFRIPYFIGPLANGQSDFAWLTRKADGEIRPWNIEEKVDFGKSAIDFIEKMTNKDTYLPKENVLPKHSLCYQKYMVYNELTKIRYIDDQGKTHHFSGQEKQQIFNGLFKQQRKVKKKDLERFLYTINHIESPTIEGVEDAFNSSFATYHDLQKGGVTQEILDNPLNADMLEEIVKILTVFEDKRMIKEQLQSFSDVLDGTILKKLERRHYTGWGRLSAKLLTGIRDKHSHLTILDYLMNDDGLNRNLMQLINDSNLSFKSIIEKEQVSTADKGIQSIVAELAGSPAIKKGILQSLKIVDELVGIMGYPPQTIVVEMARENQTTGKGKNNSKPRFISLEKAIKEFGSQILKEHPTDNQCLKNDRLYLYYLQNGKDMYTGKELDIHNLSNYDIDHIIPQSFITDNSIDNRVLVSSTANREKGDNVPLLEVVRKRKAFWEKLYQAKLMSKRKFDYLTKAERGGLTEADKANFIQRQLVETRQITKNVANILYQRFNCKQDENGNEVEQVRIVTLKSTLVSQFRKQFQLYKVREVNDYHHAHDAYLNGVVANTLLKVYPQLEPEFVYGDYHQFDWFKANKATAKKQFYTNIMRFFAKENQIIDKNGEILWDNRYLDTIKKVLSYRQMNIVKKTEIQKGEFSNATVNPKGNSSKLISRKADWNPIKYGGFDGSNMAYSIVIEYEKRKKKTVIKKELIQINIMERVAFEKDQKAFLEEKGYYSPKVLTKIPKYTLYECENGRRRMLGSANEAQKGNQMVLPNHLMTLLYHAKNCEANDGESLAYIEMHREMFAELLAYISEFAKRYTLANDRLEKINMFFEQNKKGDIKVIAKSFDKLKVFNAFGAPRDFEFFETTIKRKRYYNIKELLNATIIYQSITGLYEARKRLED

SEQ ID NO: 529 - protein, 232 aa, Listeria ivanovii
MMSKLILGLDIGISSVGWGVLDESTNEVVDAGVRLFEEATRNGNEDRRGFRSARRLKRRRQHRLERAKGLIENNGFSCTDINKFNPYQARYNAIFGEVTKDELAAALFHLVKRRGTTIDAPEEEVKDVENELSTKMQLEKNAKKLATKYDYICEIQLEKLKENKVVRDHENRFRTEDYVKEARAILENQQEYYPEVTNEFIESYMALIETRRMYYDGPGSEKSPTPYGQYFI

SEQ ID NO: 530 - protein, 300 aa, Listeria monocytogenes
DDGLNRNLMQLINDSNLSFKSIIEKEQVSTTDKDLQSIVADLAGSPAIKKGILQSLKIVDELVSIMGYPPQTIVVEMARENQTTVKGKNNSRPRYKSLEKAIKEFGSQILKEHPTDNQELRNNRLYLYYLQNGKDMYTGQELDIHNLSNYDIDHIVPQSFITDNSIDNLVLTSSAGNREKGDDVPPLEIVRKRKVFWEKLFQGNLMSKRKFDYLTKAERGGLTEADKATFIHRQLVETRQITKNVANILHQRFNNETDNHGNNMEQVRIVMLKSALVSQFRKQFQLYKVREVNDYHHAHD

SEQ ID NO: 531 - protein, 782 aa, Listeria monocytogenes
  misc_feature (722)..(722): Xaa can be any naturally occurring amino acid
IFNDLFKQKRKVKKKDLELFLRNINQIESPTIEGLEDSFNASYATYHDLLKVGMKQEILDNPLNTEMLEDIVKILTVFEDKRMIKEQLQQFSDVLDGVVLKKLERRHYTGWGRLSAKLLVGIRDKQSHLTILEYLMNDDGLNRNLMQLINDSNLSFKSIIEKEQVSTTDKDLQSIVADLAGSPAIKKGILQSLKIVDELVSIMGYPPQTIVVEMARENQTTVKGKNNSRPRYKSLEKAIKEFGSQILKEHPTDNQELKNNRLYLYYLQNGKDIYTGQELDIHNLSNYDIDHIVPQSFITDNSIDNLVLTSSAGNREKGDDVPPLEIVRKRKVFWEKLYQGNLMSKRKFDYLTKAERGGLTEADKARFIHRQLVETRQITKNVANILHQRFNNETDNHGNTMEQVRIVTLKSALVSQFRKQFQLYKVREVNDYHHAHDAYLNGVVANTLLKVYPQLEPEFVYGEYHQFDWFKANKATAKKQFYTNIMLFFAQKERIIDENGEILWDKKYLETIKKVLDYRQMNIVKKTEIQKGEFSKATIKPKGNSSKLIPRKENWDPMKYGGLDSPNMAYAVIIEHAKGKKKIVIEKKLIQINIMERKMFEKDEEAFLEEKGYRHPKVLTKLPKYTLYECEKGRRRMLASANEAQKGNQLVLSNHLVSLLYHAKNCEASDGKSLKYTEAHRETFSELLAQVSEFATRYTLADANLSKINNLFEQNKEGDIKXIAQSFVDLMVFNAMGAPASFKFFEATIDRKRYTNLKELLSSTIIYQSITGLYESRKRLDD

SEQ ID NO: 532 - protein, 1334 aa, Listeria monocytogenes; identical to SEQ ID NO: 114

SEQ ID NO: 533 - protein, 1334 aa, Listeria monocytogenes
MKNPYTIGLDIGTNSVGWAVLTDQYDLVKRKMKVAGNSDKKQIKKNFWGVRLFDDGQTAVDRRMNRTARRRIERRRNRISYLQEIFAVEMANIDANFFCRLNDSFYVDSEKRNSRHPFFATIEEEVAYHKNYRTIYHLREELVNSSEKADLRLVYLALAHIIKYRGNFLIEGALDTKNTSVDEVYKQFIQTYNQVFMSNIEEGALAKVEENTEVASILAGKFTRREKFERILRLYPGEKSTGMFAQFISLIVGNKGNFQKVFNLVEKTDIECAKDSYEEDLEALLAIIGDEYAELFVAAKNTYNAVVLSSIITVTATETNAKLSASMIERFDAHEKELGELKAFIKLHLPKQYQEIFNNAEIDGYAGYIDGKTKQVDFYKYLKTTLENVEGADYFITKIEEENFLRKQRTFDNGVIPHQLHLEELEAILHQQAKYYPFLREGYDKIKSLVTFRIPYFVGPLANGQSEFAWLTRKDDGEIRPWNIEEKVDFGKSAVDFIEKMTNKDTYLPKENVLPKHSLCYQKYMVYNELTKIRYIDDQGKTNYFSGREKQQIFNDLFKQKRKVKKKDLELFLRNINHIESPTIEGLEDSFNASYATYHDLLKVGLKQEILDNPLNTEILEDIVKILTVFEDKRMIKEQLEQFSDVLDGVVLKKLERRHYTGWGRLSAKLLVGIRDKQSHLTILDYLMNDDGLNRNLMQLINDSNLSFKSIIEKEQVSTTDKDLQSIVADLAGSPAIKKGILQSLKIVDELVSIMGYPPQTIVVEMARENQTTGKGKNNSKPRYKSLEKAIKDFGSQILKEHPTDNQELKNNRLYLYYLQNGKDIYTGQELDIHNLSNYDIDHIVPQSFITDNSIDNLVLTSSAGNREKGGDVPPLEIVRKRKVFWEKLYQGNLMSKRKFDYLTKAERGGLTEADKARFIHRQLVETRQITKNVANILHQRFNKETDNHGNTMEQVRIVTLKSALVSQFRKQFQLYKVREVNDYHHAHDAYLNGVVANTLLKVYPQLEPEFVYGEYHQFDWFKANKATAKKQFYTNIMLFFAQKERIIDENGEILWDKKYLETIKKVLDYRQINIVKKTEIQKGEFSKATIKPKGNSSKLIPRKENWDPMKYGGLDSPNMAYAVIIEHAKGKKKIVIEKKLIQINIMERKMFEKDEEAFLEEKGYHQPKVLTKLPKYTLYECEKGRRRMLSSANEAQKGNQLVLSNHLVSLLYHAKNCEASDGKSLKYIEAHRETFSELLAQVSEFATKYTLADANLSKINNLFEQNKEGDIKAIAQSFVDLMAFNAMGAPASFKFFEATIDRKRYTNLKELLSSTIIYQSITGLYESRKRLDD

SEQ ID NO: 534 - protein, 1334 aa, Listeria monocytogenes
MKNPYTIGLDIGTNSVGWAVLTDQYDLVKRKMKVAGNSDKKQIKKNFWGVRLFDDGQTAVDRRMNRTARRRIERRRNRISYLQEIFAVEMANIDANFFCRLNDSFYVDSEKRNSRHPFFATIEEEVAYHKNYRTIYHLREELVNSSEKADLRLVYLALAHIIKYRGNFLIEGALDTKNTSVDEVYKQFIQTYNQVFMSNIEEGALAKVEENTEVASILAGKFTRREKFERILRLYPGEKSTGMFAQFISLIVGNKGNFQKVFNLVEKTDIECAKDSYEEDLEALLAIIGDEYAELFVAAKNTYNAVVLSSIITVTATETNAKLSASMIERFDAHEKELGELKAFIKLHLPKQYQEIFNNAEIDGYAGYIDGKTKQVDFYKYLKTTLENVEGADYFITKIEEENFLRKQRTFDNGVIPHQLHLEELEAILHQQAKYYPFLREGYDKIKSLVTFRIPYFVGPLANGQSEFAWLTRKDDGEIRPWNIEEKVDFGKSAVDFIEKMTNKDTYLPKENVLPKHSLCYQKYMVYNELTKIRYIDDQGKTNYFSGREKQQIFNDLFKQKRKVKKKDLELFLRNINHIESPTIEGLEDSFNASYATYHDLLKVGLKQEILDNPLNTEILEDIVKILTVFEDKRMIKEQLEQFSDVLDGVVLKKLERRHYTGWGRLSAKLLVGIRDKQSHLTILDYLMNDDGLNRNLMQLINDSNLSFKSIIEKEQVSTTDKDLQSIVADLAGSPAIKKGILQSLKIVDELVSIMGYPPQTIVVEMARENQTTGKGKNNSKPRYKSLEKAIKDFGSQILKEHPTDNQELKNNRLYLYYLQNGKDIYTGQELDIHNLSNYDIDHIVPQSFITDNSIDNLVLTSSAGNREKGGDVPPLEIVRKRKVFWEKLYQGNLMSKRKFDYLTKAERGGLTEADKARFIHRQLVETRQITKNVANILHQRFNKETDNHGNTMEQVRIVTLKSALVSQFRKQFQLYKVREVNDYHHAHDAYLNGVVANTLLKVYPQLEPEFVYGEYHQFDWFKANKATAKKQFYTNIMLFFAQKERIIDENGEILWDKKYLETIKKVLDYRQINIVKKTEIQKGEFSKATIKPKGNSSKLIPRKENWDPVKYGGLDSPNMAYAVIIEHAKGKKKIVIEKKLIQINIMERKMFEKDEEAFLEEKGYHQPKVLTKLPKYTLYECEKGRRRMLSSANEAQKGNQLVLSNHLVSLLYHAKNCEASDGKSLKYIEAHRETFSELLAQVSEFATKYTLADANLSKINNLFEQNKEGDIKAIAQSFVDLMAFNAMGAPASFKFFEATIDRKRYTNLKELLSSTIIYQSITGLYESRKRLDD

SEQ ID NO: 535 - protein, 1099 aa, Listeria monocytogenes
MKNPYTIGLDIGTNSVGWAVLTDQYDLVKRKMKVAGNSDKKQIKKNFWGVRLFDDGQTAVDRRMNRTARRRIERRRNRISYLQEIFAVEMANIDANFFCRLNDSFYVDSEKRNSRHPFFATIEEEVAYHKNYRTIYHLREELVNSSEKADLRLVYLALAHIIKYRGNFLIEGALDTKNTSVDEVYKQFIQTYNQVFMSNIEEGALAKVEENTEVASILAGKFTRREKFERILRLYPGEKSTGMFAQFISLIVGNKGNFQKVFNLVEKTDIECAKDSYEEDLEALLAIIGDEYAELFVAAKNTYNAVVLSSIITVTATETNAKLSASMIERFDAHEKELGELKAFIKLHLPKQYQEIFNNAEIDGYAGYIDGKTKQVDFYKYLKTTLENVEGADYFITKIEEENFLRKQRTFDNGVIPHQLHLEELEAILHQQAKYYPFLREGYDKIKSLVTFRIPYFVGPLANGQSEFAWLTRKDDGEIRPWNIEEKVDFGKSAVDFIEKMTNKDTYLPKENVLPKHSLCYQKYMVYNELTKIRYIDDQGKTNYFSGREKQQIFNDLFKQKRKVKKKDLELFLRNINHIESPTIEGLEDSFNASYATYHDLLKVGLKQEILDNPLNTEILEDIVKILTVFEDKRMIKEQLEQFSDVLDGVVLKKLERRHYTGWGRLSAKLLVGIRDKQSHLTILDYLMNDDGLNRNLMQLINDSNLSFKSIIEKEQVSTTDKDLQSIVADLAGSPAIKKGILQSLKIVDELVSIMGYPPQTIVVEMARENQTTGKGKNNSKPRYKSLEKAIKDFGSQILKEHPTDNQELKNNRLYLYYLQNGKDIYTGQELDIHNLSNYDIDHIVPQSFITDNSIDNLVLTSSAGNREKGGDVPPLEIVRKRKVFWEKLYQGNLMSKRKFDYLTKAERGGLTEADKARFIHRQLVETRQITKNVANILHQRFNKETDNHGNTMEQVRIVTLKSALVSQFRKQFQLYKVREVNDYHHAHDAYLNGVVANTLLKVYPQLEPEFVYGEYHQFDWFKANKATAKKQFYTNIMLFFAQKERIIDENGEILWDKKYLETIKKVLDYRQINIVKKTEIQKGEFSKATIKPKGIPAN

SEQ ID NO: 536 - protein, 1334 aa, Listeria monocytogenes
MKNPYTIGLDIGTNSVGWAVLTDQYDLVKRKMKVAGNSDKKQIKKNFWGVRLFDEGETAADRRMNRTARRRIERRRNRISYLQEIFALEMANIDANFFCRLNDSFYVDSEKRNSRHPFFATIEEEVAYHKNYRTIYHLREELVNSSEKADLRLVYLALAHIIKYRGNFLIEGALDTKNTSVDGVYKQFIQTYNQVFISNIEEGTLAKMEENTTVADILAGKFTRKEKLERILQLYPGEKSTGMFAQFISLIVGSKGNFQKVFDLVEKTDIECAKDSYEEDLEALLAIIGDEYAELFVAAKNTYNAVVLSSIITVTDTETNAKLSASMIERFDAHEKDLSELKAFIKLHLPKQYEEIFSNVAIDGYAGYIDGKTKQVDFYKYLKTLLENIEGADYFIAKIEEENFLRKQRTFDNGAIPHQLHLEELEAILHQQAKYYPFLKEAYDKIKSLVTFRIPYFVGPLANGQSDFAWLTRKADGEIRPWNIEEKVDFGKSAVDFIEKMTNKDTYLPKENVLPKHSLYYQKYMVYNELTKVRYIDDQGKTNYFSGQEKQQIFNDYFKQKRKVSKKDLEQFLRNMSHIESPTIEGLEDSFNSSYATYHDLLKVGIKQEVLENPLNTEMLEDIVKILTVFEDKRMIKEQLQQFSDVLDGAVLKKLERRHYTGWGRLSAKLLVGIRDKQSHLTILDYLMNDDGLNRNLMQLINDSNLSFKSIIEKEQVSTTDKDLQSIVADLAGSPAIKKGILQSLKIVDELVSIMGYPPQTIVVEMARENQTTVKGKNNSRPRYKSLEKAIKEFGSQILKEHPTDNQELRNNRLYLYYLQNGKDMYTGQELDIHNLSNYDIDHIVPQSFITDNSIDNLVLTSSAGNREKGDDVPPLEIVRKRKVFWEKLFQGNLMSKRKFDYLTKAERGGLTEADKATFIHRQLVETRQITKNVANILHQRFNNETDNHGNNMEQVRIVMLKSALVSQFRKQFQLYKVREVNDYHHAHDAYLNGVVANTLLKVYPQLEPEFVYGEYHQFDWFKANKATAKKQFYTNIMLFFAQKERIIDENGEILWDKKYLETIKKVLDYRQMNIVKKTEIQKGEFSKATIKPKGNSSKLIPRKENWDPMKYGGLDSPNMAYAVIIEHAKGKKKVVFEKKIIRITIMERKAFEKDEKSFLEKQGYRQPKVLTKLPKYTLYECENGRRRMLASANEAQKGNQQVLKGQLITLLHHAKNCEASDGKSLDYIESNREMFGELLAHVSEFAKRYTLADANLSKINQLFEQNKDNDIKVIAQSFVNLMAFNAMGAPASFKFFEATIERKRYTNLKELLSATIIYQSITGLYEARKRLDG

SEQ ID NO: 537 - protein, 1334 aa, Listeria monocytogenes
MKNPYTIGLDIGTNSVGWAVLTNQYDLVKRKMKVAGNSDKKQIKKNFWGVRLFDDGQTAVDRRMNRTARRRIERRRNRISYLQEIFAVEMANIDANFFCRLNDSFYVDSEKRNSRHPFFATIEEEVAYHKNYRTIYHLREELVNSSEKADLRLVYLALAHIIKYRGNFLIEGALDTKNTSVDGVYEQFIQTYNQVFMSNIEEGTLAKVEENIEVANILAGKFTRREKFERILQLYPGEKSTGMFAQFISLIVGSKGNFQKVFDLIEKTDIECAKDSYEEDLEALLAIIGDEYAELFVAAKNTYNAVVLSSIITVTATETNAKLSASMIERFDAHEKDLGELKAFIKLHLPKQYQEIFNNAAIDGYAGYIDGKTKQVDFYKYLKTILENIEGADYFIAKIEEENFLRKQRTFDNGAIPHQLHLEELEAIIHQQAKYYPFLREDYEKIKSLVTFRIPYFVGPLAKGQSEFAWLTRKADGEIRPWNIEEKVDFGKSAVDFIEKMTNKDTYLPKENVLPKHSLCYQKYMVYNELTKVRYIDDQGKTNYFSGQEKQQIFNDLFKQKRKVKKKDLELFLRNINHIESPTIEGLEDSFNASYATYHDLLKVGMKQEILDNPLNTEMLEDIVKILTVFEDKPMIKEQLQQFSDVLDGGVLKKLERRHYTGWGRLSAKLLVGIREKQSHLTILDYLMNDDGLNRNLMQLINDSNLSFKSIIEKEQVSTTDKDLQSIVADLAGSPAIKKGILQSLKIVDELVSIMGYPPQTIVVEMARENQTTGKGKNNSKPRYKSLEKAIKEFGSKILKEHPTDNQELKNNRLYLYYLQNGKDMYTGQELDIHNLSNYDIDHIVPQSFITDNSIDNLVLTSSAGNREKGGDVPPLEIVRKRKVFWEKLYQGNLMSKRKFDYLTKAERGGLTDADKARFIHRQLVETRQITKNVANILHQRFNNETDNHGNTMEQVRIVTLKSALVSQFRKQFQLYKVREVNDYHHAHDAYLNGVVANTLLKVYPQLEPEFVYGEYHQFDWFKANKATAKKQFYTNIMLFFGQKERIIDENGEILWDKKYLETIKKVLDYRQMNIVKKTEIQKGEFSKATIKPKGNSSKLIPRKENWDPMKYGGLDSPNMAYAVIIEHAKGKKKLIFEKKIIRITIMERKMFEKDEEAFLEEKGYRHPKVLTKLPKYTLYECEKGRRRMLASANEAQKGNQLVLSNHLVSLLYHAKNCEASDGKSLKYIEAHRETFSELLAQVSEFATRYTLADANLSKINNLFEQNKEGDIQAIAQSFVDLMAFNAMGAPASFKFFEATIDRKRYTNLKELLSSTIIYQSITGLYESRKRLDD

SEQ ID NO: 538 - protein, 874 aa, Listeria seeligeri; identical to SEQ ID NO: 180

SEQ ID NO: 539 - protein, 1087 aa, Unknown
  Listeriaceae bacterium
MKKLVLGLDIGVASVGWGIIDAENGDVVDTGVRLFSSRDASENESRRTSRQSRRLSRRKKHRRERIKQLLLAHDMDICDIVNENPYELRVKGLNEKLEVSEIYVALTHLAKRRGVSYLDDVVEEGGTIKSEHLNKNMEEIKSGKMPCEIQLERFEKYGQVRGMIEINQDTEESSFLVNIFRTSDYIKEAKTILATQQKFHKQITNEFIDEYIHIMASKRDYFIGPGNEKSRTDYGVYRTNGDTWDNLFEILIGKCSVFPEETRAARSSYVAQEFNLLNDLNNLKISNLESGKLSASQKHDIVEKVKNSKKFGTKDLLKYIASVCECKIEDIGGCRVDKNRKPIMHTFENYRKVHNALNEAGVDLRLSETDYDELMKIMTLNSETLEIKKQCKEKLPQLTEDYLNVCLVLNKKGAFSGWHALSLKAMKLMMPELYGTSKNQMQIIHTMQLGKAYLKPLNQQKYLNSEAILEEIYNPIAARSIRQTIKVTNAILKKYGHLDSVIIEMPRDYQTSEDERKMIEKMQKENEKEKKAALKRAREEYPFPDEAFRNHKELATKLRLWYQQDQFCVYSGRKISVVDLVRNPNQFEIDHIIPQSVSLDDSLNNKVLCFSEENQKKGQQTPFYYHKGKSGNWTYEQYKLFVEKLFDKKKISNKKRELLLFEEDINKWDVRRGFIARNLVDTRYASRVILNSYQQYFGNHEMGTKVKVVRGKFTSQLRKKWRIFKDRNESHSHHAIDALIVAATANLRLWKKNTLGVSDEGKVYDKETGEILPFEKLTESEYNEMMNKEPYLNFKTKLQNIETKVKYSYRVSKKVNRKISDATIYSTRERDGIDYIVGKIKNIYDVKTYKDQFLKRYKKNKEQFLMYQHDPQTFAILENIMATYQDAENPFLAYKKEYGVIRKYSKKGGGSPVTSLKFIDKVLGQKIDLTAKNQAALPKNKKVVLQSITPYRADVYYDEIDKRYHLIGVKYSLFSFSKQGYVINPIAYQKLLEKEQIHSEMKFCFSLYREDIIEFGEDPDSLTRYRFWSKNESGKNKIEVKPIEKPNFEKQTVLTITKKIKILNKYQTDVLGNSFKAQEEKDPRNIE

SEQ ID NO: 540 - protein, 1345 aa, Unknown
  Marinilabilia sp.
MKKILGLDLGTTSIGWAFIKEPEKDVVGSEIVDMGVRIVALSSDEENDFAKGNTISINADRTLKRGARRNLQRFKLRRDALLEIFKEMKLIPSNFKYAEDGPSSTFSTLKLRDKAAKEKIELDDLVKVLLQINKKRGYRSSRKAKSEEDDGSAIDSMGIAKELYENDLTPGQWVFEALQKGRKNVPDFYRSDLQEEFKKIVNYQSEFYPDVLNSSFVEDWMGKASTPTKQYFNKKGVHLAENKGKREERRLQEYNWRAVAVNSKIDLSEIALILSQINSQISNSSGYLGAISDRSKELYFKNQTVGQYLYQQIKINPHTRLKGQVFYRQDYLDEFEKIWSVQSGFHPQLNDALKKEIRDITIFFQRRLKSQKHLISNCEFEDYHKVVPKSHPIFQEFRIWQNLNNLTLIKKDNLNEKSELALEDKIALANELAFKREQSVKDALNILGLKSSEWEFNFTKIEGNRTNHAFFEAFAKIIEIEDGEPLDLGNLKADDILDQFSEAFLRIGIDPGLLQVNNDIEGPNYEKQPYIQFWHLLYSSEDDQKLKQNLIKKFGFKPDHAKILASISLQDDHASLSSRAIKKILPHLQSGLIYDKACTYAGYNHSSSFTKEENEKRELSSELDLLKKNSLRNPVVEKILNQMINVVNAILKDPNLGKPDEIRVEMARELKANAEQRKNMTSNIASATRDHEKYREILKKEFGLKRVTKNDLLRYKLWLETDGISLYTGKPIEASKLFSKEYDIEHIIPKTRLFDDSFSNKTICERQLNIDKANVTAFSFLQNKLSGDEFEQYQSRVKSLFGKLSKAKIQKLLMANDKIPEDFIARQLQETRYISKKAKEILFEITRRVSVTTGTITDKLREDWGLVEIMKELNWEKYDKLGLTYTIEGKHGERLNKIKDWSKRNDHRHHAMDALTVALTKPAYIQYLNNLNAKELNGKKSTEIFAIEQKYLKRENGKLCFIPPVENIRTEAKKHLSKVLISYKAKNKVVTINKNRTNKKAGFNEQIALTPRGQLHKETVYGKAFHYSTKFEKIGASFDVQKINAVAKKEEREALLKRLAENGDDPKKAFTGKNSLSKMPIYLDLKRNIKLPEKVKTVVLEQNYTIRKNIDPDLKLDKVIDVGVKRILENRLKEFGGNAKLALSNLDENPIWLNKEKGITIKRVKISGVSNVESLHVKKDHFGEPILDQVGNEIPVDFVSTGNNHHVAIYEDEKGNLQEEVVSFFEAVVRQNQGLPIINKNHSLGWKFLFTLKQNEYFVFPSDDFDPTDVDLMDEENYHLISPNLFRVQKFTTKDYFFRHHLETTVEDKSELKGVSFKRLGLPGLNCIKKIRINHLGKIIQVGEY

SEQ ID NO: 541 - protein, 1091 aa, Mobiluncus mulieris
MDSRKYRVGIDVGTNSVGFAAVEEDDSGSPTRFLNTMVVIHDSGVDSEQKKYAITRLASAGTARRTRRLYRTRRQRLRELDDFISNELGYPLVNLENFADPYEPWKVRADLATTKLPNDELPEAMSIALRHMARHRGWRSPYQRVEALHLHAEISKEFAALKERVVEKTGDVFSDDATPAEVLVDLMGRQKVRGADGVLSGKLRQSDNANELRKIASVQGIDDETLNRIIDRVFSSKSPKGKASERVGMDALPGQGSKPRALKAMPSFQKFRVVSVICNLRIKDSGGDARPLSMEEKEKLIDYLMSSTTDDHVTWTDVADLLHVKRSQLQGTAKEGFDGERPYTRPPVNSTWSKIKDSKIKSLVALWKTGDVDVQSAIVEALSNASVLEDSRPGADIVVAYLESLDDKELESLDKVGLPAGRASYSEDSLERLTERMLRDDCDLFEARKREFNVADDWKPPADPIYAPVGNPGVDRVLKIVNRLLMAAEREWGAPTQINIEHVRSGFSSELMQREFERENERRRAQNEEAVKAILTEKGGNSRVSKYDITRYYAVKRQHCQCLYCGTPITFSDCELDHIVPRKGVGSTNTRVNLAAACRSCNRDKSNLPFAVWAGKASNFDVSIDDAVSRVKQWQRSQNEGVREFRAFQNEVISRLLKTTEDPEIDSRSLESVAWMARELHHRVEYYFQSKGAQTQVSVYRGAVTAQARKSSGLEDKVKMIGGGGKTRLDRRHHAMDAATIALMTPGISTTLSEKNNLRDAQKFTGQSETWKDYCGRTETARKHFAVWKSNMERLTDLFNDKLENDAIPVVQPLRLRLSNSKAHDDGIGKLDSKKLGSVWSLADIDRAATPQIWTALTRCDDFDPTKGLPENANRVIRAQGVKYESEDNIPVFPSNVAAIAVRDGYAEIGSTIHHARIYRIDDGKKTFYSMIRVFAVDLLKHQAEDLFTVKLPPSAISIRTCEDSLRRALSNGTAEYLGWLVPGDEIIVDTSDKAFHTGQIGDLLRNFPVNSFRLTGFPSNSRLRLKPVLLAGEGLRDDAEDSIKKILLGQGWRPAINVLFSKGKPRIVRRNSLGIERPSSNNGLPFSWEA

SEQ ID NO: 542 - protein, 1233 aa, Mycoplasma canis
MEKKRKVTLGFDLGIASIGWAIVDSETNQVYKLGSRLFDAPDTNLERRTQRGTRRLLRRRKYRNQKFYNLVKRTEVFGLSSREAIENRFRELSIKYPNIIELKTKALSQEVCPDEIAWILHDYLKNRGYFYDEKETKEDFDQQTVESMPSYKLNEFYKKYGYFKGALSQPTESEMKDNKDLKEAFFFDFSNKEWLKEINYFFNVQKNILSETFIEEFKKIFSFTRDISKGPGSDNMPSPYGIFGEFGDNGQGGRYEHIWDKNIGKCSIFTNEQRAPKYLPSALIFNFLNELANIRLYSTDKKNIQPLWKLSSIDKLNILLNLFNLPISEKKKKLTNANINDIVKKESTKSIMLSVEDIDMIKDEWAGKEPNVYGVGLSGLNIEESAKENKFKFQDLKILNVLINLLDNVGIKFEFKDRNDIIKNLELLDNLYLFLIYQKESNNKDSSIDLFIAKNELLNIENLKLKLKEFLLGAGNEFENHNSKTHSLSKKAIDAILPKLLDNNEGWNLEAIKNYDEEIKSQIEDNSSLMAKQDKKYLNDNFLKDAILPPNVKVTFQQAILIFNKIIQKFSKDFEIDKVVIELAREMTQDQENDALKGIAKAQKSKKSLVEERLEANNIDKSVFNDKYEKLIYKIFLWISQDFKDPYTGAQISTNEIVNNKVEIDHIIPYSLCFDDSSANKVLVHKQSNQEKSNSLPYEYIKQGHSGWNWDEFTKYVKRVFVNNVDSILSKKERLKKSENLLTTSYDGYDKLGFLARNLNDTRYATILFRDQLNNYAEHHLIDNKKMFKVIAMNGAVTSFIRKNMSYDNKLRLKDRSDFSHHAYDAAIIALFSNKTKTLYNLIDPSLNGIISKRSEGYWVIEDRYTGEIKELKKEDWTSIKNNVQARKIAKEIEEYLIDLDDEVFFSRKTKRKTNRQLYNETIYGIAAKTDEDGITNYYKKEKFSILDDKDIYLRLLREREKFVINQSNPEVIDQIIEIIESYGKENNIPSRDEAINIKYTKNKINYNLYLKQYMRSLTKSLDQFSEEFINQMIANKTFVLYNPTKNTTRKIKFLRLVNDVKINDIRKNQVINKFNGKNNEPKAFYENINSLGAIVFKNSANNFKTLSINTQIAIFGDKNWDIEDFKTYNMEKIEKYKEIYGIDKTYNFHSFIFPGTILLDKQNKEFYYISSIQTVRDIIEIKFLNKIEFKDENKNPDTSKTPKRLMFGIKSIMNNYEQVDISPFGINKKIFE

SEQ ID NO: 543 - protein, 1233 aa, Mycoplasma canis
MEKKRKVTLGFDLGIASVGWAIVDSETNQVYKLGSRLFDAPDTNLERRTQRGTRRLLRRRKYRNQKFYNLVKRTEVFGLSSREAIENRFRELSIKYPNIIELKTKALSQEVCPDEIAWILHDYLKNRGYFYDEKETKEDFDQQTIESMPSYKLNEFYKKYGYFKGALSQPTESEMKDNKDLKEAFFFDFSNKEWLKEINYFFNVQKNILSETFIEEFKKIFSFTRDISKGPGSDNMPSPYGIFGEFGDNGQGGRYEHIWDKNIGKCSIFTNEQRAPKYLPSALIFNFLNELANIRLYSTDKKNIQPLWKLSSIDKLNILLNLFNLPISEKKKKLTSANINDIVKKESTKSIMLSVEDIDMIKDEWAGKEPNVYGVGLSGLNIEESAKENKFKFQDLKILNVLINLLDNVGIKFEFKDRNDIIKNLELLDNLYLFLIYQKESNNKDSSIDLFIAKNESLNIENLKLKLKEFLLGAGNEFENHNSKTHSLSKKAIDAILPKLLDNNEGWNLEAIKNYDEEIKSQIEDNSFLMAKQDKKYLNDNFLKDAILPPNVKVTFQQAILIFNKIIQKFSKDFEIDKVVIELAREMTQDQENDALKGIAKAQKSKKSLVEERLEANNIDKSVFNEKYEKLIYKIFLWISQDFKDPYTGAKISANEIVDNKVEIDHIIPYSLCFDDSSANKVLVHKQSNQEKSNSLPYEYIKQGHSGWNWDEFTKYVKRVFVNNVDSILSKKERLKKSENLLTTSYDGYDKLGFLARNLNDTRYATILFRDQLNNYAEHHLIDDKKMFKVIAMNGAVTSFIRKNMSYDNKLRLKNRNDFSHHAYDAAIIALFSNKTKTLYNLIDPSLNGIISKRSEGYWVIEDRYTGEIKELKKEDWTSIKNNVQARKIAKEIEEYLIDLDDEVFFSRKTKRKTNRQLYNETIYGIAAKTDEDGITNYYKKEKLSILDDKDIYLRLLREREKFVINQSNPEVIDQIIEIIESYGKENNIPSRDEAINIKYTKNKINYNLYLKQYMRSLTKSLDQFSEEFINQMIANKTFVLYNPTKNTTRKIKFLRLVNDVKINDIRKNQVINKFNGKNNEPKAFYENINSLGAIVFKNSANNFKTLSINTQIAIFGDKNWDIEDFKTYNMEKIEKYKEIYGIDKTYNFHSFIFPGTILLDKQNKEFYYISSIQTVRDIIEIKFLNKIEFKDENKNQDTSKTPKRLMFGIKSIMNNYEQVDISPFGINKKIFE

SEQ ID NO: 544 - protein, 1233 aa, Mycoplasma canis; identical to SEQ ID NO: 247

SEQ ID NO: 545 - protein, 1233 aa, Mycoplasma canis
MEKKRKVTLGFDLGIASVGWAIVDSETNQVYKLGSRLFDAPDTNLERRTQRGTRRLLRRRKYRNQKFYNLVKRTEVFGLSSREAIENRFRELSIKYPNIIELKTKALSQEVCPDEIAWILHDYLKNRGYFYDEKETKEDFDQQTVESMPSYKLNEFYKKYGYFKGALSQPTESEMKDNKDLKEAFFFDFSNKEWLKEINYFFNVQKNILSETFIEEFKKIFSFTRDISKGPGSDNMPSPYGIFGEFGDNGQGGRYEHIWDKNIGKCSIFTNEQRAPKYLPSALIFNFLNELANIRLYSTDKKNIQPLWKLSSVDKLNILLNLFNLPISEKKKKLTSTNINDIVKKESIKSIMISVEDIDMIKDEWAGKEPNVYGVGLSGLNIEENAKENKFKFQDLKILNVLINLLDNVGIKFEFKDRNDIIKNLELLDNLYLFLIYQKESNNKDSSIDLFIAKNKSLNIENLKLKLKEFLLGAGNEFENHNSKSHSLSKKAIDAILPKLLDNNEGWNLEAIKNYDEEIKSQIEDNSSLMAKQDKKYLNDNFLKDAILPPNVKVTFQQAILIFNKIIQKFSKDFEIDKVVIELAREMTQDQENDALKGMAKAQKSKKSLVEERLEANNIDKSVFNDKYEKLIYKIFLWISQDFKDPYTGAQISVNEIVNNKVEIDHIIPYSLCFDDSSANKVLVHKQSNQEKSNSLPYEYIKQGHSGWNWDEFTKYVKRVFVNNVDSILSKKERLKKSENLLTTSYDGYDKLGFLARNLNDTRYATILFRDQLNNYAEHHLIDNKKMFKVIAMNGAVTSFIRKNMSYDNKLRLKDRSDFSHHAYDAAIIALFSNKTKTLYNLIDPSLNGIISKRSEGYWVIEDRYTGEIKELKKEDWTSIKNNVQARKIAKEIEEYLIDLDDEVFFSRKTKRKTNRQLYNETIYGIAAKTDEDGITNYYKKEKFSILDDKDIYLRLLREREKFVINQSNPEVIDQIIEIIESYGKENNIPSRDEAINIKYTKNKINYNLYLKQYMRSLTKSLDKFSEEFINQMIANKTFVLYNPTKNTTRKIKFLRLVNDVKINDIRKNQVINKFNGKNNEPKAFYENINSLGAIVFKNSANNFKTLSINTQIAIFGDKNWDIEDFKTYNMEKIEKYKEIYGIDKTYNFHSFIFPGTILLDKQNKEFYYISSIQTVRDIIEIKFLNKIEFKDENKNQDTSKTPKRLMFGIKSIMNNYEQVDISPFGINKKIFE

SEQ ID NO: 546 - protein, 1233 aa, Mycoplasma canis
MEKKRKVTLGFDLGIASVGWAIVDSETNQVYKLGSRLFDAPDTNLERRTQRGTRRLLRRRKYRNQKFYNLVKRTEVFGLSSREAIENRFRELSIKYPNIIELKTKALSQEVCPDEIAWILHDYLKNRGYFYDEKETKEDFDQQTVESMPSYKLNEFYKKYGYFKGALSQPTESEMKDNKDLKEAFFFDFSNKEWLKEINYFFNVQKNILSETFIEEFKKIFSFTRDISKGPGSDNMPSPYGIFGEFGDNGQGGRYEHIWDKNIGKCSIFTNEQRAPKYLPSALIFNFLNELANIRLYSTDKKNIQPLWKLSSVDKLNILLNLFNLPISEKKKKLTSTNINDIVKKESIKSIMLSVEDIDMIKYEWAGKEPNVYGVGLSGLNIEESAKENKFKFQDLKILNVLINLLDNVGIKFEFKDRNDIIKNLELLDNLYLFLIYQKESNNKDSSIDLFIAKNKSLNIENLKLKLKEFLLGAGNEFENHNSKTHSLSKKAIDAILPKLLDNNEGWNLEAIKNYDEEIKSQIEDNSSLMAKQDKKYLNDNFLKDAILPPNVKVTFQQAILIFNKIIQKFSKDFEIDKVVIELAREMTQDQENDALKGIAKAQKSKKSLVEERLEANNIDKSVFDDKYEKLIYKIFLWISQDFKDPYTGAKISANEIVNNKVEIDHIIPYSLCFDDSSANKVLVHKQSNQEKSNSLPYEYIKQGHSGWNWDEFTKYVKRVFVNNVDSILSKKERLKKSENLLTTSYDGYDKLGFLARNLNDTRYATILFRDQLNNYAEHHLIDNKKMFKVIAMNGAVTSFIRKNMSYDNKLRLKDRSDFSHHAYDAAIIALFSNKTKTLYNLIDPSLNGIISKRSEGYWVIEDRYTGEIKELKKEDWTSIKNNVQARKIAKEIEEYLIDLDDEVFFSRKTKRKTNRQLYNETIYGIAAKTDEDGITNYYKKEKFSILDDKDIYLRLLREREKFVINQSNPEVIDQIIEIIESYGKENNIPSRDEAINIKYTKNKINYNLYLKQYMRSLTKSLDQFSEEFINQMIANKTFVLYNPTKNTTRKIKFLRLVNDVKINDIRKNQVINKFNGKNNEPKAFYENINSLGAIVFKNSANNFKTLSINTQIAIFGDKNWDIEDFKTYNMEKIEKYKEIYGIDKTYNFHSFIFPGTILLDKQNKEFYYISSIQTVRDIIEIKFLNKIEFKDENKNQDTSKTPKRLMFGIKSIMNNYEQVDISPFGINKKIFE

SEQ ID NO: 547 - protein, 1239 aa, Mycoplasma cynos
MEEKRKVTLGFDLGVASVGWAIVDSETNEVYKLGSRLFDIPDTNIDRRAKRGSRRLVRRRSYRNQKFYNLIKRTKTFGFLDKEAIEKEFVLLSIKYPNIIELKVKGLQEEVSKSEAVWILHDYLKNRGYFYDDKEEKDDLENPSIESMPSYKLYEFYKEYGYFKGALSSPTESEKNKDSDLEKAIFFNFSNKEWTKEINHFFKIQKNIFSEDFKAKFMEFFSFIRDISKGPGSENMPSQYSIFGKYGDDGMGGKYQHIWDKNIGKCSIFKDKVRAPKYLPSALFFNLLNELSNIRLYSVDKREKSVLWRLSSKDKINIILNILQIILFKNDGKISNLDINKIVKNESIKSIILNEIDLDLIKDMWFEKEPNVYGIGLSGLNIEENKKENRFKFQDLKIFSVFIDLLKKSNINIEFNNEKDIIHNLKLLDELYFFLITQKYSRDKYGSIKKFILNNKSFNIDNLDEKLNIFLSISDDEFDNHNSKTHSLSKEAIYFIFPKLLHNNEGWNLEAIKNYDIDVREEISKHSFGIKKQDKKYLDDAFLDDAILPPSVKVTIKQSILIFNKIIKKFSNKFQIDNVVIELAREMTQEKEMDAQKSLNRLKKSRKKIIEERLNANNIDSKMFRDKTGEISPNYIYKIYLWISQNFKDPYTGENISANDILKNNVEIDHIIPYSLCFDDSSSNKVLVFKHSNQSKGNFLPFDMISTFSENSVWNWKEYTQYVEKTFKTNLESILDKKERVKKADNLLTSSYDGYDKLGFLARNLNDTRYATILFRDQLINYSENHLIDSKKMFKVIAMNGGVTSFIRKNMSFDSGLKVKDRSIFSHHAYDAAIIALFSNKTKILYNLINPSLDGIISKRSEGYWVLEDRLTGEIRKLNYNDWQSIKNNVEVKKIAREIESHLSNLDNVVMFSRKSKRKTNKELYNETLYGIATRIDENGIKNYYKKEKFNILEDENIYLRLLNERENFIINRSNPEVIDAIIEIFETIDKNKIPARDVAKNIKYTDNKIKYNLYLKDYMRKLVDEFPDKFRKDFIEQMIAKKIFILFNPIKNTTRKIKSLRSINNNKIEDIRKKQVLEKFNTAKNEPRSFYESLNSLGAIIFKNNLNIYKKMSISSQIATFGDKNWKIDDINTYNKEKLNKYKEIYGIDETYDFYSFIFPGTILLDEKNKEFLYISSIQTLKDKIELKFLDRIEFEKKNVNSNLKPKIKREIISTKKLMSDYKIIKISPLGINKKIFE

SEQ ID NO: 548 - protein, 1269 aa, Mycoplasma gallisepticum
MNNSIKSKPEVTIGLDLGVGSVGWAIVDNETNIIHHLGSRLFSQAKTAEDRRSFRGARRLIRRRKYKLKRFINLIWKYNSYFGFKNKEDILNNYQEQQKLHNTVLNLKLEALNAKIDPKALSWILHDYLKNRGHFYEDNRDFNVYPTEELANYFGEYGYYKGIIDSKEDNDDKLEEGLTKYKFSNQHWLEEIKKVLSNQTGLPEKFKEEYESLFSYVRNYSEGPGSINSVSPYGIYHLDEKEGKVVQKYNNIWDKTIGKCSIFPDEYRAPKNSPIAMIFNEINELSTIRSYSIYLTGWFINQEFKKAYLNKLLDLLIKTNSEKPIDARQFKKLREETIAESIGKETLKDVEREEKLEKEDHKWKLKGLKLNTNGKIQYNDLSSLAKFVHKLKQHLKLDFLLEDQYTTLDKINFLQSLFVYLGKHLRYSNRVDSANLKEFSDSNKLFERVLQEQKDDLFKLFEQTDKDDEKILAQTHSLSTKAMLLAITRMTNLDNDEDNQKNNDKGWNFEAIKNFDQKFIDITKKNNNLSLKQDKRYLDDRFINDAILSPGVKRILREATKVFNAILKQFSEEYDVTKVVIELARELSEEKELENTKNYEKLIKKNSDKISERLEALDIAEDKIEDILKSPTKSYKVLLWLQQDHIDPYSQKEIAFEDILTKTEKTEIDHIIPYSISFDDSSSNKLLVLAESNQAKSNQTPYEFITSGNAGIKWEDYEAYCRKFKDGDTSLLDSTQRSKKFAKMMKTDTSSKYDIGFLARNLNDTRYATIVFRDALKDYANNHLVEDKPMFKVVCINGGVTSFLRKNFDKSWYAKKDRDKNIHHAVDASIISIFSNETKTLFNQLTQFADYKLFKNTDGSWKKIDPKTGVVTEVTDENWKQIRVRNQVSEIAKVINKCIQDSNIERKARYSRKIENKTNISLFNDTVYSAKKVGYEDQIKRKNLKTLDIHESAEENKNSKVKKQFVYRKLVNVSLLNNDKLADLFAEKEDILMYRANPWVINLAEQIFNEYTENKKIKSQNVFEKYMLDLTKEFPEKFSEAFVKSMLRNKTAIIYNVEKKVVHRIKRLKILSSELKENKLSNVIIRSKNESGTKLSYQDTINSIALMIMRSIDPTAKKQYIRVPLNTLNLHLGDQDFDLHNIDAYLKKPKFVKYLKANEIGDEYKPWRVLTSGTLLIHKKDKKLMYISSFQNLKDVIEIKNLIETEYKENDDSDPKKKKKANRFLMTLSTILNDYILLDAKDNFDILGLSKNRIDEILNSKLGLDKITK

SEQ ID NO: 549 - protein, 1224 aa, Mycoplasma gallisepticum
MNNSIKSKPEVTIGLDLGVGSVGWAIVDNETNIIHHLGSRLFSQAKTAEDRRSFRGARRLIRRRKYKLKRFINLIWKYNSYFGFKNKEDILNNYQEQQKLHNTVLNLKLEALNAKIDPKALSWILHDYLKNRGHFYEDNRDFNVYPTEELANYFGEYGYYKGIIDSKEDNDDKLEEGLTKYKFSNQHWLEEIKKVLSNQTGLPEKFKEEYESLFSYVRNYSEGPGSINSVSPYGIYHLDEKEGKVVQKYNNIWDKTIGKCSIFPDEYRAPKNSPIAMIFNEINELSTIRSYSIYLTGWFINQEFKKAYLNKLLDLLIKTNSEKPIDARQFKKLREETIAESIGKETLKDVEREEKLEKEDHKWKLKGLKLNTNGKIQYNDLSSLAKFVHKLKQHLKLDFLLEDQYTTLDKINFLQSLFVYLGKHLRYSNRVDSANLKEFSDSNKLFERVLQEQKDDLFKLFEQTDKDDEKILAQTHSLSTKAMLLAITRMTNLDNDEDNQKNNDKGWNFEAIKNFDQKFIDITKKNNNLSLKQDKRYLDDRFINDAILSPGVKRILREATKVFNAILKQFSEEYDVTKVVIELARELSEEKELENTKNYEKLIKKNSDKISERLEALDIAEDKIEDILKSPTKSYKVLLWLQQDHIDPYSQKEIAFEDILTKTEKTEIDHIIPYSISFDDSSSNKLLVLAESNQAKSNQTPYEFITSGNAGIKWEDYEAYCRKFKDGDTSLLDSTQRSKKFAKMMKTDTSSKYDIGFLARNLNDTRYATIVFRDALKDYANNHLVEDKPMFKVVCINGGVTSFLRKNFDKSWYAKKDRDKNIHHAVDASIISIFSNETKTLFNQLTQFADYKLFKNTDGSWKKIDPKTGVVTEVTDENWKQIRVRNQVSEIAKVINKCIQDSNIERKARYSRKIENKTNISLFNDTVYSAKKVGYEDQIKRKNLKTLDIHESAEENKNSKVKKQFVYRKLVNVSLLNNDKLADLFAEKEDILMYRANPWVINLAEQIFNEYTENKKIKSQNVFEKYMLDLTKEFPEKFSEAFVKSMLRNKTAIIYNVEKKVVHRIKRLKILSSELKENKLSNVIIRSKNESGTKLSYQDTINSIALMIMRSIDPTAKKQYIRVPLNTLNLHLGDQDFDLHNIDAYLKKPKFVKYLKANEIGDEYKPWRVLTSGTLLIHKKDKKLMYISSFQNLKDVIEIKNLIETEYKENDDSDPKKRRKQIGS

SEQ ID NO: 550 - protein, 1269 aa, Mycoplasma gallisepticum; identical to SEQ ID NO: 138

SEQ ID NO: 551 - protein, 226 aa, Mycoplasma iowae
MSNKKKITIGLDIGVSSVGWSILREDNVLIDYGSRLFPDAANAKDGKLENEARRSHRSMRRRIRRIKTRKNDLIKLLIKYNIISDQDELAKILEQGIVNETGNVPIVEIKYKGLKEKLSKEELLICLYHYIHKRGYFYITEEDLKENGENINRLPTEIQYDFYMKNGYYIGNEDNQKFSNLIWVKEIEKFLSKQSLDSNFVDEYISLFRRVRDYSDGPGSEKSPTP

SEQ ID NO: 552 - protein, 1304 aa, Mycoplasma synoviae
MLNNVQNLWKYLLLLIFDKKIIFLFKIKVILIRRYMENNNKEKIVIGFDLGVASVGWSIVNAETKEVIDLGVRLFSEPEKADYRRAKRTTRRLLRRKKFKREKFHKLILKNAEIFGLQSRNEILNVYKDQSSKYRNILKLKINALKEEIKPSELVWILRDYLQNRGYFYKNEKLTDEFVSNSFPSKKLHEHYEKYGFFRGSVKLDNKLDNKKDKAKEKDEEEESDAKKESEELIFSNKQWINEIVKVFENQSYLTESFKEEYLKLFNYVRPFNKGPGSKNSRTAYGVFSTDIDPETNKFKDYSNIWDKTIGKCSLFEEEIRAPKNLPSALIFNLQNEICTIKNEFTEFKNWWLNAEQKSEILKFVFTELFNWKDKKYSDKKFNKNLQDKIKKYLLNFALENFNLNEEILKNRDLENDTVLGLKGVKYYEKSNATADAALEFSSLKPLYVFIKFLKEKKLDLNYLLGLENTEILYFLDSIYLAISYSSDLKERNEWFKKLLKELYPKIKNNNLEIIENVEDIFEITDQEKFESFSKTHSLSREAFNHIIPLLLSNNEGKNYESLKHSNEELKKRTEKAELKAQQNQKYLKDNFLKEALVPLSVKTSVLQAIKIFNQIIKNFGKKYEISQVVIEMARELTKPNLEKLLNNATNSNIKILKEKLDQTEKFDDFTKKKFIDKIENSVVFRNKLFLWFEQDRKDPYTQLDIKINEIEDETEIDHVIPYSKSADDSWFNKLLVKKSTNQLKKNKTVWEYYQNESDPEAKWNKFVAWAKRIYLVQKSDKESKDNSEKNSIFKNKKPNLKFKNITKKLFDPYKDLGFLARNLNDTRYATKVFRDQLNNYSKHHSKDDENKLFKVVCMNGSITSFLRKSMWRKNEEQVYRFNFWKKDRDQFFHHAVDASIIAIFSLLTKTLYNKLRVYESYDVQRREDGVYLINKETGEVKKADKDYWKDQHNFLKIRENAIEIKNVLNNVDFQNQVRYSRKANTKLNTQLFNETLYGVKEFENNFYKLEKVNLFSRKDLRKFILEDLNEESEKNKKNENGSRKRILTEKYIVDEILQILENEEFKDSKSDINALNKYMDSLPSKFSEFFSQDFINKCKKENSLILTFDAIKHNDPKKVIKIKNLKFFREDATLKNKQAVHKDSKNQIKSFYESYKCVGFIWLKNKNDLEESIFVPINSRVIHFGDKDKDIFDFDSYNKEKLLNEINLKRPENKKFNSINEIEFVKFVKPGALLLNFENQQIYYISTLESSSLRAKIKLLNKMDKGKAVSMKKITNPDEYKIIEHVNPLGINLNWTKKLENNN

SEQ ID NO: 553 - protein, 1401 aa, Myroides injenensis
MKRILGLDLGTTSIGWAYVHEAENVNETSSIQKVGVRVNPLTTEEQTNFEKGKPITTNASRTLARSARRNLQRYKLRRDNLIQILKENNWINNTTSLTETGNHSTFETYELRNKAASEKLTLDQLSRVLLMLNKKRGYKSSRKVNSKEEGQLIDGMEVAKKLYHEQLTPGQLSLQLMNQGVKKLPDYYRSDLNQELESIWNFQQQFYPNILTDKFKEEINGKGLTSTSSAFWNIYNFNTAENKGSRDEKKKQALQWRSEALSKQLSKEIVAYIIADLNGQIYNSSGYLGAISDRSKELYFNNLTVGQYLFKQLKSNPHTSLKNQVFYRQDYLNEFEKIWETQSKFYPKELTAALKREIRDVIIFYQRKLKSQKGLISFCEFEQKQKTINGKTKTIGHRVIPKSSPLFQEFKIWQQLHNVVLRNKKTNEIVSLADEQKVHLFEELNLKGKLKSNQVLKLIENKPKDWELNYTELEGNNTNKALYNAYLDILDIEGYDVRNELKVKLNKDDIELSDLDVNASEIKEMIFSVFKHLGINTEILEFDATLEDKVFEKQASYQLWHLLYSYEEDNSPTGLDRLYNLLHKKFGFKLNHAKLIGNVLFQDDYGSLSSKAIKNIFPYITENNYYTACELAGYKHSKHSLTKEENETRELKNRLTILPKNSLRNPVVEKIINQMINVVNTLIDEENNILIAQGKEPNFQFDEIRIELARELKKNAKEREELTKSINKSKTDHEKIIKILQKEDGIKNPTRNDIVRFKLYSELKNNGYKDLYTNEYIERKDIFTKEYDIEHIIPQSKLFDDSFSNKTLVRRNVNLKKGNQTAYDFILCEYGQEKANEFETRITNLYNLGKDEGISKSKFKKLLMQESEIGNGFIERDLRETQYIAKKAKSLLLEITRNVISTSGSITDRLREDWGLINVMKELNLQKYRDAGLTEFVKMKDGNKKEVIIDWTKRNDHRHHAMDALTIAFTKHNHIQYLNHLNARKNVNNELHNNIIAIEKLETTLVSDERGNKKRIFKEPIANFRTIAKSHLEAILVSHKAKNKVVTKNINKISGKKISQQTLTPRGQLHKETIYGKIRQYVSKQEKVGPKFTIEVIEQVSNPTYRNLLLKRLEENNNDPKKAFGGKNSLNKNPIYINLEKNIKVPEVLKLVWLEDNYTIRKEISPDLKIDKVIDQGVKQILQNRLAQYKGDSKLAFSNLDANPIWLNEDKGIAIKRVTISGIATAQPLHRKKDHLGQPILDHNGQEIPVDFISTGNNHHVAIYEDENGKLQESVVSHFEAVERVNQKLPIIDKTFNQHLGWKFLFTMKQNELFLFPSDDFNPNEIDLFDKQNYTVISKHLFRIQKLSTKDYSFRHHLETNVEEIKDLKTITWRREGLNGIQNIIKVRTNHLGEIIHIGEY

SEQ ID NO: 554 - protein, 1466 aa, Myroides odoratus
MKNILGLDLGTNSIGWALVKEDFENKQGEILGLGSRIIPMSQDILGEFGRGNSISQTADRTGYRGVRRLRERHLLRRERLHRVLNILGFLPNHYAKEIDFTKRLGKFINHAEPKLSFDKEFIFKDSFNEMLKDFQQNQPGFIINKHGEEALVPYDWTIYYLRKKALTQKIDKEELAWILLNFNQKRGYYQLRGEEEEENTNKLVEFYSLKIIDVIADNEVNKKGEVWYSLHLENGWIYRRSSKISLVDWKDKVRDFIVTTDVNDDGSEKLDKDGVVKRSFRAPSADDWTLLKKKTEQDIDNSNKTVGAYIYENLLLNPKQKIKGKLVRTIERKFYKDELKQILEKQKEFHQELQNEQLLQDCVRELYKYNEQHQQMLESKDFVHLFLNDIIFYQRPLRSQKSLISNCTLEKRVSRDGVVFPIKVISKSNPYYQEFRLLQWLQNLAIYRKDDDVNVTQEFLNSIESWENLLQFLNAKKEIKQEQLIKFLLEQKGLKGNSLKTAILTYRWNYVTDKVYPMNETRSLIQDKLKKVENVATDFLSFDNEMALWHIIYSVNDKIEYEKALAKFASKHNLDEISFVESFKKFPPFKSDYGSFSEKAIKKLLPLMRFGSVWNKNNIVPSVLDRIDKILTGEYDEKIKIRVREKAEQFQLNQIEDFQNLPLWLAQYVVYDRHSEAEIAGKWNSVKDLENYLKEFKQHSLRNPIVEQIITETLRVVKDIWQQYGNGVQNFFDEIHIELGREMKNTADERKRITNSVTENENTNLRIKALLVELKEDTNIENVRPHSPMQQEILKIYEEGVLNAVENIDEDILKISKTAQPSKSELIRYKLWLEQKYQSPYTGEMIPLSRLFTSDYEIEHVIPQSRYFDDSLSNKVICEAAVNKRKDNQLGLEFIKNHHSEKIELGNGRTAQVLEVEAYESFVKKNYDKNRGKRNKLLLEDVPEKMIERQLNDTRYISKFVTHLLSNIVRKDEVNSKDDGINSKNIIPGNGKITSQLKQDWGLNDVWNELILPRFERMNNLTNSTDFTSTNTNGKIIPTVPLEYSKGFSKKRIDHRHHALDALVIALATRDHVNLLNNESALPKKDRTKEEQKSFRFDLQVNLRNKEKYFNVKEGREKEKFTTFKKPWNTLTQDTRDALENMVVSFKQNLRVINKATNYYESYTDENGNLRLDKYGNPKKELISQKGTNWAIRKSLHKETVSGQIHLDRVKVTKGKIVTATRKSLDSSFNEKSIESITDTGIQKILRNYLKAKDNKPDVAFSPEGIEELNKSISVYNEGKNHQPIIKVRIFEQGSKFPVGETGNKIAKFVEAAKGTNLFFGIYQDKTGKRSYDTIPLNLVIERLKQGLSPVPETNEKGHQLLFHLSPNDLVYVPTIDDNEQLDSNRVYKFTDSSDTTCNFIPSNISAIIFNINSKEQEKRGINYPIQNELGVGSPQSKNQKSFDGFMIKEVCIKLKVDRLGNISKT

SEQ ID NO: 555 - protein, 241 aa, Neisseria lactamica
MAAFKPNPMNYILGLDIGIASVGWAMVEIDKEENPIRLIDLGVRVFERAEMPKTGDSLAMARRLARSVRRLTRRRAHRLLRARRLLKREGVLQDADFDENGLVKSLPNTPWQLRAAALDRKLTCLEWSAVLLHLIKHRGYLSQRKNEGETADKELGALLKGVADNAHALQTGDFRTPAELALNKFEKESGHIRNQRGDYSHTFSRKDLQAELNLLFEKQKEFGNPHVSDGLKEGIETLLMA

SEQ ID NO: 556 - protein, 666 aa, Neisseria lactamica
MAAFKPNPMNYILGLDIGIASVGWAMVEVDEEENPIRLIDLGVRVFERAEVPKTGDSLAMARRLARSVRRLTRRRAHRLLRARRLLKREGVLQDADFDENGLVKSLPNTPWQLRAAALDRKLTCLEWSAVLLHLVKHRGYLSQRKNEGETADKELGALLKGVADNAHALQTGDFRTPAELALNKFEKESGHIRNQRGDYSHTFSRKDLQAELNLLFEKQKEFGNPHVSDGLKEDIETLLMAQRPALSGDAVQKMLGHCTFEPAEPKAAKNTYTAERFIWLTKLNNLRILEQGSERPLTDTERATLMDEPYRKSKLTYAQARKLLGLEDTAFFKGLRYGKDNAEASTLMEMKAYHAISRALEKEGLKDKKSPLNLSTELQDEIGTAFSLFKTDKDITGRLKDRVQPEILEALLKHISFDKFVQISLKALRRIVPLMEQGKRYDEACAEIYGDHYCKKNAEEKIYLPPIPADEIRNPVVLRALSQARKVINCVVRRYGSPARIHIETAREVGKSFKDRKEIEKRQEENRKDREKAAAKFREYFPNFVGEPKSKDILKLRLYEQQHGKCLYSGKEINLVRLNEKGYVEIDHALPFSRTWDDSFNNKVLVLGSENQNKGNQTPYEYFNGKDNSREWQEFKARVETSRFPRSKNNGFCCKNSMKKDLKNAT

SEQ ID NO: 557 - protein, 828 aa, Neisseria lactamica
MLGHCTFEPAEPKAAKNTYTAERFIWLTKLNNLRILEQGSERPLTDTERATLMDEPYRKSKLTYAQARKLLGLEDTAFFKGLRYGKDNAEASTLMEMKAYHAISRALEKEGLKDKKSPLNLSTELQDEIGTAFSLFKTDKDITGRLKDRVQPEILEALLKHISFDKFVQISLKALRRIVPLMEQGKRYDEACAEIYGDHYGKKNTEEKIYLPPIPADEIRNPVVLRALSQARKVINAVVRRYDSPARIHIETAREVGKSFKDRKEIEKRQEENRKDREKAAAKFREYFPNFVGEPKSKDILKLRLYEQQHGKCLYSGKEINLVRLNEKGYVEIDHALPFSRTWDDSFNNKVLVLGSENQNKGNQTPYEYFNGKDNSREWQEFKARVETSRFPRSKKQRILLQKFDEEGFKERNLNDTRYVNRFLCQFVADHILLTGKGKRRVFASNGQITNLLRGFWGLRKVRAENDRHHALDAVVVACSTVAMQQKITRFVRYKEMNAFDGKTIDKETGEVLHQKAHFPQPWEFFAQEVMIRVFGKPDGKPEFEEADTSEKLRTLLAEKLSSRPEAVHEYVTPLFVSRAPNRKMSGQGHMETVKSAKRLDEGISVLRVPLTQLKLKDLEKMVNREREPKLYDALKAQLETHKDDPAKAFAEPFYKYDKAGSRTQQVKAVRIEQVQKTGVWVRNHNGIADNATMVRVDVFEKGGKYYLVPIYSWQVAKGILPDRAVVAFKDEEDWTVMDDSFEFRFVLYANDLIKAELKKETFFGYFSGLDRSTGNISLRSHDLDKTKGKDGVYRIGIKTALSFQKHQIDELGKEIRPCRLKKRPPVR

SEQ ID NO: 558 - protein, 408 aa, Neisseria lactamica
MNDTRYVNRFLCQFVADHILLTGKGKRRVFASNGQITNLLRGFWGLRKVRTENDRHHALDAVVVACSTVAMQQKITRFVRYKEMNAFDGKTIDKETGEVLHQKAHFPQPWEFFAQEVMIRVFGKPDGKPEFEEADTPEKLRTLLAEKLSSRPEAVHEYVTPLFVSRAPNRKMSGQGHMETVKSAKRLDEGISVLRVPLTQLKLKGLEKMVNREREPKLYDALKAQLETHKDDPAKAFAEPFYKYDKAGSRTQQVKAVRIEQVQKTGVWVRNHNGIADNATMVRVDVFEKGGKYYLVPIYSWQVAKGILPDRAVVAFKDEEDWTVMDDSFEFRFVLYANDLIKLTAKKNEFLGYFVSLNRATGAIDIRTHDTDSTKGKNGIFQSVGVKTALSFQKTKSTNSAKKSDHAV

SEQ ID NO: 559 - protein, 1082 aa, Neisseria meningitidis
MAAFKPNPINYILGLDIGIASVGWAMVEIDEDENPICLIDLGVRVFERAEVPKTGDSLAAARRLARSVRRLTRRRAHRLLRARRLLKREGVLQAADFDENGLIKSLPNTPWQLRAAALDRKLTPLEWSAVLLHLIKHRGYLSQRKNEGETADKELGALLKGVADNAHALQTGDFRTPAELALNKFEKESGHIRNQRGDYSHTFSRKDLQAELILLFEKQKEFGNPHVSGGLKEGIETLLMTQRPALSGDAVQKMLGHCTFEPAEPKAAKNTYTAERFIWLTKLNNLRILEQGSERPLTDTERATLMDEPYRKSKLTYAQARKLLGLEDTAFFKGLRYGKDNAEASTLMEMKAYHAISRALEKEGLKDKKSPLNLSPELQDEIGTAFSLFKTDEDITGRLKDRVQPEILEALLKHISFDKFVQISLKALRRIVPLMEQGKRYDEACAEIYGDHYGKKNTEEKIYLPPIPADEIRNPVVLRALSQARKVINGVVRRYGSPARIHIETAREVGKSFKDRKEIEKRQEENRKDREKAAAKFREYFPNFVGEPKSKDILKLRLYEQQHGKCLYSGKEINLGRLNEKGYVEIDHALPFSRTWDDSFNNKVLVLGSENQNKGNQTPYEYFNGKDNSREWQEFKARVETSRFPRSKKQRILLQKFDEDGFKERNLNDTRYVNRFLCQFVADRMRLTGKGKKRVFASNGQITNLLRGFWGLRKVRAENDRHHALDAVVVACSTVAMQQKITRFVRYKEMNAFDGKTIDKETGEVLHQKTHFPQPWEFFAQEVMIRVFGKPDGKPEFEEADTPEKLRTLLAEKLSSRPEAVHEYVTPLFVSRAPNRKMSGQGHMETVKSAKRLDEGVSVLRVPLTQLKLKDLEKMVNREREPKLYEALKARLEAHKDDPAKAFAEPFYKYDKAGNRTQQVKAVRVEQVQKTGVWVRNHNGIADNATMVRVDVFEKGDKYYLVPIYSWQVAKGILPDRAVVQGKDEEDWQLIDDSFNFKFSLHPNDLVEVITKKARMFGYFASCHRGTGNINIRIHDLDHKIGKNGILEGIGVKTALSFQKYQIDELGKEIRPCRLKKRPPVR

SEQ ID NO: 560 - protein, 976 aa, Neisseria meningitidis
MAAFKPNPINYILGLDIGIASVGWAMVEIDEDENPICLIDLGVRVFERAEVPKTGDSLAAARRLARSVRRLTRRRAHRLLRARRLLKREGVLQAADFDENGLIKSLPNTPWQLRAAALDRKLTPLEWSAVLLHLIKHRGYLSQRKNEGETADKELGALLKGVADNAHALQTGDFRTPAELALNKFEKESGHIRNQRGDYSHTFSRKDLQAELILLFEKQKEFGNPHVSGGLKEGIETLLMTQRPALSGDAVQKMLGHCTFEPAEPKAAKNTYTAERFIWLTKLNNLRILEQGSERPLTDTERATLMDEPYRKSKLTYAQARKLLGLEDTAFFKGLRYGKDNAEASTLMEMKAYHAISRALEKEGLKDKKSPLNLSPELQDEIGTAFSLFKTDEDITGRLKDRIQPEILEALLKHISFDKFVQISLKALRRIVPLMEQGKRYDEACAEIYGDHYGKKNTEEKIYLPPIPADEIRNPVVLRALSQARKVINGVVRRYGSPARIHIETAREVGKSFKDRKEIEKRQEENRKDREKAAAKFREYFPNFVGEPKSKDILKLRLYEQQHGKCLYSGKEINLGRLNEKGYVEIDHALPFSRTWDDSFNNKVLVLGSENQNKGNQTPYEYFNGKDNSREWQEFKARVETSRFPRSKKQRILLQKFDEDGFKERNLNDTRYVNRFLCQFVADRMRLTGKGKKRVFASNGQITNLLRGFWGLRKVRAENDRHHALDAVVVACSTVAMQQKITRFVRYKEMNAFDGKTIDKETGEVLHQKTHFPQPWEFFAQEVMIRVFGKPDGKPEFEEADTPEKLRTLLAEKLSSRPEAVHEYVTPLFVSRAPNRKMSGQGHMETVKSAKRLDEGVSVLRVPLTQLKLKDLEKMVNREREPKLYEALKARLEAHKDDPAKAFAEPFYKYDKAGNRTQQVKAVRVEQVQKTGVWVRNHNGIADNATMVRVDVFEKGDKYYLVPIYSWQVAKGIFAG

SEQ ID NO: 561 - protein, 1081 aa, Neisseria meningitidis
MAAFKPNPINYILGLDIGIASVGWAMVEIDEDENPICLIDLGVRVFERAEVPKTGDSLAAARRLARSVRRLTRRRAHRLLRARRLLKREGVLQAADFDENGLIKSLPNTPWQLRSAALDRKLTPLEWSAVLLHLIKHRGYLSQRKNEGETADKELGALLKGVADNAHALQTGDFRTPAELALNKFEKESGHIRNRRGDYSHTFSRKDLQAELDLLFEKQKEFGNPHISDDLKEGIETLLMTQRPALSGDAVQKMLGHCTFEPTEPKAAKNTYTAERFVWLTKLNNLRILEQGSERPLTDTERATLMDEPYRKSKLTYAQARKLLELDDTAFFKGLRYGKDNAEASTLMEMKAYHAISRALEKEGLKDKKSPLNLSPELQDEIGTAFSLFKTDEDITGRLKDRVQPEILEVLLKHISFDKFVQISLKALRRIVPLMEQGKRYDEACAEIYGDHDGKKNTEEKIYLPPIPADEIRNPVVLRALSQARKVINAVVRRYGSPARIHIETAREVGKSFKDRKEIEKRQEENRKDREKAAAKFREYFPNFVGEPKSKDILKLRLYEQQHGKCLYSGKEINLGRLNEKGYVEIDHALPFSRTWDDSFNNKVLVLGSENQNKGNQTPYEYFNGKDNSREWQEFKARVETSRFPRSKKQRILLQKFDEEGFKERNLNDTRYVNRFLCQFVADHMLLTGKGKRRVFASNGQITNLLRGFWGLRKVRAENNRHHALDAVVVACSTVAMQQKITRFVRYKEMNAFDGKTIDKETGEVLHQKTHFPQPWEFFAQEVMIRVFGKPDGKPEFEEADTPEKLRTLLAEKLSSRPEAVHEYVTPLFVSRAPNRKMSGQGHMETVKSAKRLDEGVSVLRVPLTQLKLKDLEKMVNREREPKLYEALKARLEAHKDDPAKAFAEPFYKYDKAGNRTQQVKAVRVEQVQKTGVWVRNHNGIADNATMVRVDVFEKAGKYYLVPIYSWQVAKGILPDRAVVAYADEEGWTVIDESFRFKFVLYSNDLIKVQLKKDSFLGYFSGLDRATGAISLREHDLEKSKGKDGMHRIGVKTALSFQKYQIDEMGKEIRLCRLKKRPPVR

SEQ ID NO: 562 - protein, 1081 aa, Neisseria meningitidis
MAAFKPNPINYILGLDIGIASVGWAMVEIDEDENPICLIDLGVRVFERAEVPKTGDSLAAARRLARSVRRLTRRRAHRLLRARRLLKREGVLQAADFDENGLIKSLPNTPWQLRSAALDRKLTPLEWSAVLLHLIKHRGYLSQRKNEGETADKELGALLKGVANNAHALQTGDFRTPAELALNKFEKESGHIRNQRGDYSHTFSRKDLQAELILLFEKQKEFGNPHVSGGLKEGIETLLMTQRPALSGDAVQKMLGHCTFEPAEPKAAKNTYTAERFIWLTKLNNLRILEQGSERPLTDTERATLMDEPYRKSKLTYAQARKLLGLEDTAFFKGLRYGKDNAEASTLMEMKAYHAISRALEKEGLKDKKSPLNLSPELQDEIGTAFSLFKTDEDITGRLKDRIQPEILEALLKHISFDKFVQISLKALRRIVPLMEQGKRYDEACAEIYGDHYGKKNTEEKIYLPPIPADEIRNPVVLRALSQARKVINGVVRRYGSPARIHIETAREVGKSFKDRKEIEKRQEENRKDREKAAAKFREYFPNFVGEPKSKDILKLRLYEQQHGKCLYSGKEINLGRLNEKGYVEIDHALPFSRTWDDSFNNKVLVLGSENQNKGNQTPYEYFNGKDNSREWQEFKARVETSRFPRSKKQRILLQKFDEDGFKERNLNDTRYVNRFLCQFVADRMRLTGKGKKRVFASNGQITNLLRGFWGLRKVRAENDRHHALDAVVVACSTVAMQQKITRFVRYKEMNAFDGKTIDKETGEVLHQKTHFPQPWEFFAQEVMIRVFGKPDGKPEFEEADTPEKLRTLLAEKLSSRPEAVHEYVTPLFVSRAPNRKMSGQGHMETVKSAKRLDEGVSVLRVPLTQLKLKDLEKMVNREREPKLYEALKARLEAHKDDPAKAFAEPFYKYDKAGNRTQQVKAVRVEQVQKTGVWVRNHNGIADNATMVRVDVFEKAGKYYLVPIYSWQVAKGILPDRAVVAYADEEGWTVIDESFRFKFVLYSNDLIKVQLKKDSFLGYFSGLDRATGAISLREHDLEKSKGKDGMHRIGVKTALSFQKYQIDEMGKEIRLCRLKKRPPVR

SEQ ID NO: 563 - protein, 1082 aa, Neisseria meningitidis
MAAFKPNPINYILGLDIGIASVGWAMVEIDEDENPICLIDLGVRVFERAEVPKTGDSLAMARRLARSVRRLTRRRAHRLLRARRLLKREGVLQAADFDENGLIKSLPNTPWQLRAAALDRKLTPLEWSAVLLHLIKHRGYLSQRKNEGETADKELGALLKGVADNAHALQTGDFRTPAELALNKFEKESGHIRNQRGDYSHTFSRKDLQAELILLFEKQKEFGNPHVSGGLKEGIETLLMTQRPALSGDAVQKMLGHCTFEPAEPKAAKNTYTAERFIWLTKLNNLRILEQGSERPLTDTERATLMDEPYRKSKLTYAQARKLLGLEDTAFFKGLRYGKDNAEASTLMEMKAYHAISRALEKEGLKDKKSPLNLSPELQDEIGTAFSLFKTDEDITGRLKDRIQPEILEALLKHISFDKFVQISLKALRRIVPLMEQGKRYDEACAEIYGDHYGKKNTEEKIYLPPIPADEIRNPVVLRALSQARKVINGVVRRYGSPARIHIETAREVGKSFKDRKEIEKRQEENRKDREKAAAKFREYFPNFVGEPKSKDILKLRLYEQQHGKCLYSGKEINLGRLNEKGYVEIDHALPFSRTWDDSFNNKVLVLGSENQNKGNQTPYEYFNGKDNSREWQEFKARVETSRFPRSKKQRILLQKFDEDGFKERNLNDTRYVNRFLCQFVADRMRLTGKGKKRVFASNGQITNLLRGFWGLRKVRAENDRHHALDAVVVACSTVAMQQKITRFVRYKEMNAFDGKTIDKETGEVLHQKTHFPQPWEFFAQEVMIRVFGKPDGKPEFEEADTPEKLRTLLAEKLSSRPEAVHEYVTPLFVSRAPNRKMSGQGHMETVKSAKRLDEGVSVLRVPLTQLKLKDLEKMVNREREPKLYEALKARLEAHKDDPAKAFAEPFYKYDKAGNRTQQVKAVRVEQVQKTGVWVRNHNGIADNATMVRVDVFEKGDKYYLVPIYSWQVAKGILPDRAVVQGKDEEDWQLIDDSFNFKFSLHPNDLVEVITKKARMFGYFASCHRGTGNINIRIHDLDHKIGKNGILEGIGVKTALSFQKYQIDELGEEIRPCRLKKRPPVR

SEQ ID NO: 564 - protein, 1082 aa, Neisseria meningitidis
MAAFKPNPINYILGLDIGIASVGWAMVEIDEDENPICLIDLGVRVFERAEVPKTGDSLAMARRLARSVRRLTRRRAHRLLRARRLLKREGVLQAADFDENGLIKSLPNTPWQLRAAALDRKLTPLEWSAVLLHLIKHRGYLSQRKNEGETADKELGALLKGVADNAHALQTGDFRTPAELALNKFEKESGHIRNQRGDYSHTFSRKDLQAELILLFEKQKEFGNPHVSGGLKEGIETLLMTQRPALSSDAVQKMLGHCTFEPAEPKAAKNTYTAERFIWLTKLNNLRILEQGSERPLTDTERATLMDEPYRKSKLTYAQARKLLGLEDTAFFKGLRYGKDNAEASTLMEMKAYHAISRALEKEGLKDKKSPLNLSPELQDEIGTAFSLFKTDEDITGRLKDRIQPEILEALLKHISFDKFVQISLKALRRIVPLMEQGKRYDEACAEIYGDHYGKKNTEEKIYLPPIPADEIRNPVVLRALSQARKVINGVVRRYGSPARIHIETAREVGKSFKDRKEIEKRQEENRKDREKAAAKFREYFPNFVGEPKSKDILKLRLYEQQHGKCLYSGKEINLGRLNEKGYVEIDHALPFSRTWDDSFNNKVLVLGSENQNKGNQTPYEYFNGKDNSREWQEFKARVETSRFPRSKKQRILLQKFDEDGFKERNLNDTRYVNRFLCQFVADRMRLTGKGKKRVFASNGQITNLLRGFWGLRKVRAENDRHHALDAVVVACSTVAMQQKITRFVRYKEMNAFDGKTIDKETGEVLHQKTHFPQPWEFFAQEVMIRVFGKPDGKPEFEEADTPEKLRTLLAEKLSSRPEAVHEYVTPLFVSRAPNRKMSGQGHMETVKSAKRLDEGVSVLRVPLTQLKLKDLEKMVNREREPKLYEALKARLEAHKDDPAKAFAEPFYKYDKAGNRTQQVKAVRVEQVQKTGVWVRNHNGIADNATMVRVDVFEKGDKYYLVPIYSWQVAKGILPDRAVVQGKDEEDWQLIDDSFNFKFSLHPNDLVEVITKKARMFGYFASCHRGTGNINIRIHDLDHKIGKNGILEGIGVKTALSFQKYQIDELGKEIRPCRLKKRPPVR

SEQ ID NO: 565 - protein, 1082 aa, Neisseria meningitidis
MAAFKPNPINYILGLDIGIASVGWAMVEIDEDENPICLIDLGVRVFERAEVPKTGDSLAMARRLARSVRRLTRRRAHRLLRARRLLKREGVLQAADFDENGLIKSLPNTPWQLRAAALDRKLTPLEWSAVLLHLIKHRGYLSQRKNEGETADKELGALLKGVADNAHALQTGDFRTPAELALNKFEKESGHIRNQRGDYSHTFSRKDLQAELILLFEKQKEFGNPHVSGGLKEGIETLLMTQRPALSSDAVQKMLGHCTFEPAEPKAAKNTYTAERFIWLTKLNNLRILEQGSERPLTDTERATLMDEPYRKSKLTYAQARKLLGLEDTAFFKGLRYGKDNAEASTLMEMKAYHAISRALEKEGLKDKKSPLNLSPELQDEIGTAFSLFKTDEDITGRLKDRIQPEILEALLKHISFDKFVQISLKALRRIVPLMEQGKRYDEACAEIYGDHYGKKNTEEKIYLPPIPADEIRNPVVLRALSQARKVINGVVRRYGSPARIHIETAREVGKSFKDRKEIEKRQEENRKDREKAAAKFREYFPNFVGEPKSKDILKLRLYEQQHGKCLYSGKEINLGRLNEKGYVEIDHALPFSRTWDDSFNNKVLVLGSENQNKGNQTPYEYFNGKDNSREWQEFKARVETSRFPRSKKQRILLQKFDEDGFKERNLNDTRYVNRFLYQFVADRMRLTGKGKKRVFASNGQITNLLRGFWGLRKVRAENDRHHALDAVVVACSTVAMQQKITRFVRYKEMNAFDGKTIDKETGEVLHQKTHFPQPWEFFAQEVMIRVFGKPDGKPEFEEADTPEKLRTLLAEKLSSRPEAVHEYVTPLFVSRAPNRKMSGQGHMETVKSAKRLDEGVSVLRVPLTQLKLKDLEKMVNREREPKLYEALKARLEAHKDDPAKAFAEPFYKYDKAGNRTQQVKAVRVEQVQKTGVWVRNHNGIADNATMVRVDVFEKGDKYYLVPIYSWQVAKGILPDRAVVQGKDEEDWQLIDDSFNFKFSLHPNDLVEVITKKARMFGYFASCHRGTGNINIRIHDLDHKIGKNGILEGIGVKTALSFQKYQIDELGKEIRPCRLKKRPPVR

SEQ ID NO: 566 - protein, 1081 aa, Neisseria meningitidis
MAAFKPNPINYILGLDIGIASVGWAMVEIDEDENPICLIDLGVRVFERAEVPKTGDSLAMARRLARSVRRLTRRRAHRLLRARRLLKREGVLQAADFDENGLIKSLPNTPWQLRAAALDRKLTPLEWSAVLLHLIKHRGYLSQRKNEGETADKELGALLKGVADNAHALQTGDFRTPAKLALNKFEKESGHIRNQRGDYSHTFSRKDLQAELNLLFEKQKEFGNPHISDGLKEGIETLLMTQRPALSGDAVQKMLGHCTFEPTEPKAAKNTYTAERFVWLTKLNNLRILEQGSEQPLTDTQRAKLMDEPYRKSKLTYAQARKLLGLEDTAFFKGLRYGKDNAEASTLMEMKAYHAISRALEKEGLKDKKSPLNLSPELQDEIGTAFSLFKTDEDITGRLKDRVQPEILEALLKHISFDKFVQISLKALRRIVPLMEQGKRYNEACAEIYGDHYGKKNTEEKIYLPPIPADEIRNPVVLRALSQARKVINGVVRRYGSPARIHIETAREVGKSFKDRKEIEKRQEENRKDREKAAAKFQEYFPNFVGEPKSKDILKLRLYEQQHGKCLYSGKEINLGRLNEKGYVEIDHALPFSRTWDDSFNNKVLVLGSENQNKGNQTPYEYFNGKDNSREWQEFKARVETSRFPRSKKQRILLQKFDEDGFKERNLNDTRYVNRFLCQFVADRMRLTGKGKKRVFASNGQITNLLRGFWGLRKVRAENDRHHALDAVVVACSTVAMQQKITRFVRYKEMNAFDGKTIDKETGEVLHQKTHFPQPWEFFAQEVMIRVFGKPDGKPEFEEADTPEKLRTLLAEKLSSRPEAVHEYVTPLFVSRAPNRKMSGQGHMETVKSAKRLDEGVSVLRVPLTQLKLKDLEKMVNREREPKLYEALKARLEAHKDDPAKAFAEPFYKYDKAGNRTQQVKAVRVEQVQKTGVWVRNHNGIADNATMVRVDVFEKGDKYYLVPIYSWQVAKGILPDRAVVAYADEEDWTVIDESFRFKFVLYSNDLIKVQLKKDSFLGYFSGLDRATGAISLREHDLEKSKGKDGMHRIGVKTALSFQKYQIDEMGKEIRPCRLKKRPPVR

SEQ ID NO: 567 - protein, 1081 aa, Neisseria meningitidis
MAAFKPNPINYILGLDIGIASVGWAMVEIDEEENPIRLIDLGVRVFERAEVPKTGDSLAMARRLARSVRRLTRRRAHRLLRARRLLKREGVLQAADFDENGLIKSLPNTPWQLRAAALDRKLTPLEWSAVLLHLIKHRGYLSQRKNEGETADKELGALLKGVADNAHALQTGDFRTPAELALNKFEKECGHIRNQRGDYSHTFSRKDLQAELNLLFEKQKEFGNPHVSGGLKEGIETLLMTQRPALSGDAVQKMLGHCTFEPAEPKAAKNTYTAERFIWLTKLNNLRILEQGSERPLTDTERATLMDEPYRKSKLTYAQARKLLSLEDTAFFKGLRYGKDNAEASTLMEMKAYHTISRALEKEGLKDKKSPLNLSPELQDEIGTAFSLFKTDEDITGRLKDRIQPEILEALLKHISFDKFVQISLKALRRIVPLMEQGKRYDEACAEIYGDHYGKKNTEEKIYLPPIPADEIRNPVVLRALSQARKVINGVVRRYGSPARIHIETAREVGKSFKDRKEIEKRQEENRKDREKAAAKFREYFPNFVGEPKSKDILKLRLYEQQHGKCLYSGKEINLGRLNEKGYVEIDHALPFSRTWDDSFNNKVLVLGSENQNKGNQTPYEYFNGKDNSREWQEFKARVETSRFPRSKKQRILLQKFDEDGFKERNLNDTRYVNRFLCQFVADRMRLTGKGKKRVFASNGQITNLLRGFWGLRKVRAENDRHHALDAVVVACSTVAMQQKITRFVRYKEMNAFDGKTIDKETGEVLHQKTHFPQPWEFFAQEVMIRVFGKPDGKPEFEEADTPEKLRTLLAEKLSSRPEAVHEYVTPLFVSRAPNRKMSGQGHMETVKSAKRLDEGVSVLRVPLTQLKLKDLEKMVNREREPKLYEALKARLEAHKDDPAKAFAEPFYKYDKAGNRTQQVKAVRVEQVQKTGVWVRNHNGIADNATMVRVDVFEKGDKYYLVPIYSWQVAKGILPDRAVVAYADEEDWTVIDESFRFKFVLYSNDLIKVQLKKDSFLGYFSGLDRATGAISLREHDLEKSKGKDGMHRIGVKTALSFQKYQIDEMGKEIRPCRLKKRPPVR

SEQ ID NO: 568 - protein, 1082 aa, Neisseria meningitidis
MAAFKPNPINYILGLDIGIASVGWAMVEIDEEENPIRLIDLGVRVFERAEVPKTGDSLAMARRLARSVRRLTRRRAHRLLRARRLLKREGVLQAADFDENGLIKSLPNTPWQLRAAALDRKLTPLEWSAVLLHLIKHRGYLSQRKNEGETADKELGALLKGVADNAHALQTGDFRTPAELALNKFEKECGHIRNQRGDYSHTFSRKDLQAELNLLFEKQKEFGNPHVSGGLKEGIETLLMTQRPALSGDAVQKMLGHCTFEPAEPKAAKNTYTAERFIWLTKLNNLRILEQGSERPLTDTERATLMDEPYRKSKLTYAQARKLLGLEDTAFFKGLRYGKDNAEASTLMEMKAYHAISRALEKEGLKDKKSPLNLSPELQDEIGTAFSLFKTDEDITGRLKDRIQPEILEALLKHISFDKFVQISLKALRRIVPLMEQGKRYDEACAEIYGDHYGKKNTEEKIYLPPIPADEIRNPVVLRALSQARKVINGVVRRYGSPARIHIETAREVGKSFKDRKEIEKRQEENRKDREKAAAKFREYFPNFVGEPKSKDILKLRLYEQQHGKCLYSGKEINLVRLNEKGYVEIDHALPFSRTWDDSFNNKVLVLGSENQNKGNQTPYEYFNGKDNSREWQEFKARVETSRFPRSKKQRILLQKFDEEGFKERNLNDTRYVNRFLCQFVADHILLTGKGKRRVFASNGQITNLLRGFWGLRKVRAENDRHHALDAVVVACSTVAMQQKITRFVRYKEMNAFDGKTIDKETGEVLHQKTHFPQPWEFFAQEVMIRVFGKPDGKPEFEEADTPEKLRTLLAEKLSSRPEAVHEYVTPLFVSRAPNRKMSGQGHMETVKSAKRLDEGVSVLRVPLTQLKLKDLEKMVNREREPKLYEALKARLEAHKDDPAKAFAEPFYKYDKAGNRTQQVKAVRVEQVQKTGVWVRNHNGIADNATMVRVDVFEKGGKYYLVPIYSWQVAKGILPDRAVVQGKDEEDWQLIDDSFNFKFSLHPNDLVEVITKKARMFGYFASCHRGTGNINIRIHDLDHKIGKNGILEGIGVKTALSFQKYQIDELGKEIRPCRLKKRPPVR

SEQ ID NO: 569 - protein, 1081 aa, Neisseria meningitidis
MAAFKPNPINYILGLDIGIASVGWAMVEIDEEENPIRLIDLGVRVFERAEVPKTGDSLAMARRLARSVRRLTRRRAHRLLRARRLLKREGVLQAADFDENGLIKSLPNTPWQLRAAALDRKLTPLEWSAVLLHLIKHRGYLSQRKNEGETADKELGALLKGVADNAHALQTGDFRTPAELALNKFEKESGHIRNQRGDYSHTFSRKDLQAELILLFEKQKEFGNPHVSGGLKEGIETLLMTQRPALSGDAVQKMLGHCTFEPAEPKAAKNTYTAERFIWLTKLNNLRILEQGSERPLTDTERATLMDEPYRKSKLTYAQARKLLGLEDTAFFKGLRYGKDNAEASTLMEMKAYHAISRALEKEGLKDKKSPLNLSPELQDEIGTAFSLFKTDEDITGRLKDRVQPEILEALLKHISFDKFVQISLKALRRIVPLMEQGKRYDEACAEIYGDHYGKKNTEEEIYLPPITADEIRNPVVLRALSQARKVINAVVRRYGSPARIHIETAREVGKSFKDRKEIEKRQEENRKDREKAAAKFREYFPNFVGEPKSKDILKLRLYEQQHGKCLYSGKEINLVRLNEKGYVEIDHALPFSRTWDDSFNNKVLVLGSENQNKGNQTPYEYFNGKENSREWQEFKARVETSRFPRSKKQRILLQKFDEDGFKERNLNDTRYVNRFLCQFVADRMRLTGKGKKRVFASNGQITNLLRGFWGLHKVRAENDRHHALDAVVVACSTIAMQQKITRFVRYKEMNAFDGKTIDKETGEVLHQKAHFPQPWEFFAQEVMIRVFGKPDGKPEFEEADTPEKLRTLLAEKLSSRPEAVHEYVTPLFVSRAPNRKMSGQGHMETVKSAKRLDEGISVLRVPLTQLKLKDLEKMVNRAREPKLYEALKARLEAHKDDPAKAFAEPFYKYDKAGNRTQQVKAVRVEQVQKTGVWVRNHNGIADNATMVRVDVFEKAGKYYLVPIYSWQVAKGILPDRAVVAYADEEDWTVIDESFRFKFVLYSNDLIKVQLKKDSFLGYFSGLDRATGAISLREHDLEKSKGKDGMHRIGVKTALSFQKYQIDEMGKEIRPCRLKKRPPVR

SEQ ID NO: 570 - protein, 1082 aa, Neisseria meningitidis
MAAFKPNPINYILGLDIGIASVGWAMVEIDEEENPIRLIDLGVRVFERAEVPKTGDSLAMARRLARSVRRLTRRRAHRLLRARRLLKREGVLQAADFDENGLIKSLPNTPWQLRAAALDRKLTPLEWSAVLLHLIKHRGYLSQRKNEGETADKELGALLKGVANNAHALQTGDFRTPAELALNKFEKESGHIRNQRGDYSHTFSRKDLQAELILLFEKQKEFGNPHVSGGLKEGIETLLMTQRPALSGDAVQKMLGHCTFEPAEPKAAKNTYTAERFIWLTKLNNLRILEQGSERPLTDTERATLMDEPYRKSKLTYAQARKLLGLEDTAFFKGLRYGKDNAEASTLMEMKAYHAISRALEKEGLKDKKSPLNLSSELQDEIGTAFSLFKTDEDITGRLKDRVQPEILEALLKHISFDKFVQISLKALRRIVPLMEQGKRYDEACAEIYGDHYGKKNTEEKIYLPPIPADKIRNPVVLRALSQARKVINGVVRRYGSPARIHIETAREVGKSFKDRKEIEKRQEENRKDREKAAAKFREYFPNFVGEPKSKDILKLRLYEQQHGKCLYSGKEINLVRLNEKGYVEIDHALPFSRTWDDSFNNKVLVLGSENQNKGNQTPYEYFNGKDNSREWQEFKARVETSRFPRSKKQRILLQKFDEDGFKECNLNDTRYVNRFLCQFVADHILLTGKGKRRVFASNGQITNLLRGFWGLRKVRAENDRHHALDAVVVACSTVAMQQKITRFVRYKEMNAFDGKTIDKETGKVLHQKTHFPQPWEFFAQEVMIRVFGKPDGKPEFEEADTPEKLRTLLAEKLSSRPEAVHEYVTPLFVSRAPNRKMSGAHKDTLRSAKRFVKHNEKISVKRVWLTEIKLADLENMVNYKNGREIELYEALKARLEAYGGNAKQAFDPKDNPFYKKGGQLVKAVRVEKTQESGVLLNKKNAYTIADNGDMVRVDVFCKVDKKGKNQYFIVPIYAWQVAENILPDIDCKGYRIDDSYTFCFSLHKYDLIAFQKDEKSKVEFAYYINCDSSNGRFYLAWHDKGSKEQQFRISTQNLVLIQKYQVNELGKEIRPCRLKKRPPVR

SEQ ID NO: 571 - protein, 1082 aa, Neisseria meningitidis
MAAFKPNPINYILGLDIGIASVGWAMVEIDEEENPIRLIDLGVRVFERAEVPKTGDSLAMARRLARSVRRLTRRRAHRLLRARRLLKREGVLQAADFDENGLIKSLPNTPWQLRAAALDRKLTPLEWSAVLLHLIKHRGYLSQRKNEGETADKELGALLKGVANNAHALQTGDFRTPAELALNKFEKESGHIRNQRGDYSHTFSRKDLQAELILLFEKQKEFGNPHVSGGLKEGIETLLMTQRPALSGDAVQKMLGHCTFEPAEPKAAKNTYTAERFIWLTKLNNLRILEQGSERPLTDTERATLMDEPYRKSKLTYAQARKLLGLEDTAFFKGLRYGKDNAEASTLMEMKAYHAISRALEKEGLKDKKSPLNLSSELQDEIGTAFSLFKTDEDITGRLKDRVQPEILEALLKHISFDKFVQISLKALRRIVPLMEQGKRYDEACAEIYGDHYGKKNTEEKIYLPPIPADEIRNPVVLRALSQARKVINGVVRRYGSPARIHIETAREVGKSFKDRKEIEKRQEENRKDREKAAAKFREYFPNFVGEPKSKDILKLRLYEQQHGKCLYSGKEINLVRLNEKGYVEIDHALPFSRTWDDSFNNKVLVLGSENQNKGNQTPYEYFNGKDNSREWQEFKARVETSRFPRSKKQRILLQKFDEDGFKECNLNDTRYVNRFLCQFVADHILLTGKGKRRVFASNGQITNLLRGFWGLRKVRAENDRHHALDAVVVACSTVAMQQKITRFVRYKEMNAFDGKTIDKETGKVLHQKTHFPQPWEFFAQEVMIRVFGKPDGKPEFEEADTPEKLRTLLAEKLSSRPEAVHEYVTPLFVSRAPNRKMSGAHKDTLRSAKRFVKHNEKISVKRVWLTEIKLADLENMVNYKNGREIELYEALKARLEAYGGNAKQAFDPKDNPFYKKGGQLVKAVRVEKTQESGVLLNKKNAYTIADNGDMVRVDVFCKVDKKGKNQYFIVPIYAWQVAENILPDIDCKGYRIDDSYTFCFSLHKYDLIAFQKDEKSKVEFAYYINCDSSNGRFYLAWHDKGSKEQQFRISTQNLVLIQKYQVNELGKEIRPCRLKKRPPVR

SEQ ID NO: 572 - protein, 1082 aa, Neisseria meningitidis
MAAFKPNPINYILGLDIGIASVGWAMVEIDEEENPIRLIDLGVRVFERAEVPKTGDSLAMARRLARSVRRLTRRRAHRLLRTRRLLKREGVLQAANFDENGLIKSLPNTLWQLRAAALDRKLTPLEWSAVLLHLIKHRGYLSQRKNEGETADKELGALLKGVAGNAHALQTGDFRTPAELALNKFEKESGHIRNQRGDYSHTFSRKDLQAELNLLFEKQKEFGNPHISDGLKEGIETLLMTQRPALSGDAVQKMLGHCTFEPTEPKAAKNTYTTERFIWLTKLNNLRILEQGSERPLTDTERATLMDEPYRKSKLTYAQARKLLELDDIAFFKGLRYGKDNAEASTLMEMKAYHAISRALEKEGLKDKKSPLNLSPELQDEIGTAFSLFKTDEDITGRLKDRIQPEILEALLKHINFDKFVQISLKALRRIVPLMEQGKRYDEACAEIYGDHYGKKNTEEKIDLPPIPADEIHNPVVLRALSQARKVINGVVRRYGSPARIHIETAREVGKSFKDRKEIEKRQEENRKDREKAAAKFREYFPNFVGEPKSKDILKLRLYEQQHGKCLYSGKEINLGRLNEKGYVEIDHALPFSRTWDDSFNNKVLVLGSENQNKGNQTPYEYFNGKDNSREWQEFKARVETSRFPRSKKQRILLQKFDEDGFKERNLNDTRYVNRFLCQFVADRMRLTGKGKKRVFASNGQITNLLRGFWGLRKVRAENDRHHALDAVVVACSTVAMQQKITRFVRYKEMNAFDGKTIDKETGEVLHQKTHFPQPWEFFAQEVMIRVFGKPDGKPEFEEADTPEKLRTLLTEKLSSRPEAVHEYVTPLFVSRAPNRKMSGQGHMETVKSAKRLDEGISVLRVPLTQLKLKDLEKMVNREREPKLYEALKARLEAHKDDPAKAFAEPFYKYDKAGNRTQQVKAMRVEQVQKTGVWVRNHNGIADNATMVRVDVFEKGDKYYLVPIYSWQVAKGILPDRAVVQGKDEEDWQLIDDSFNFKFSLHPNDLVEVITKKARMFGYFASCHRGTGNINIRIHDLDHKIGKNGILEGIGVKTALSFQKYQIDELGKEIRPCRLKKRPPVR

SEQ ID NO: 573 - protein, 1082 aa, Neisseria meningitidis
MAAFKPNPINYILGLDIGIASVGWAMVEIDEEENPIRLIDLSVRVFERAEVPKTGDSLAMARRLARSVRRLTRRRAHRLLRARRLLKREGVLQAADFDENGLIKSLPNTPWQLRAAALDRKLTPLEWSAVLLHLIKHRGYLSQRKNEGETADKELGALLKGVADNAHALQTGDFRTPAELALNKFEKESGHIRNQRGDYSHTFSRKDLQAELILLFEKQKEFGNPHVSGGLKEGIETLLMTQRPALSGDAVQKMLGHCTFEPAEPKAAKNTYTAERFVWLTKLNNLRILEQGSERPLTDTERATLMDEPYRKSKLTYAQARKLLGLEDTAFFKGLRYGKDNAEASTLMEMKAYHAISRALEKEGLKDKKSPLRLSPELQDEIGTAFSLFKTDEDITGRLKDRVQPEILEALLKHISFDKFVQISLKALRRIVPLMEQGKRYDEACAEIYGDHYGKKNAEEKIYLPPIPADEIRNPVVLRALSQARKVINGVVRRYGSPARIHIETAREVGKSFKDRKEIEKRQEENRKDREKAAAKFREYFPNFVGEPKSKDILKLRLYEQQHGKCLYSGKEINLGRLNEKGYVEIDHALPFSRTWDDSFNNKVLVLGSENQNKGNQTPYEYFNGKDNSREWQEFKARVETSRFPRSKKQRILLQKFDEDGFKERNLNDTRYVNRFLCQFVADRMRLTGKGKKRVFASNGQITNLLRGFWGLRKVRAENDRHHALDAVVVACSTVAMQQKITRFVRYKEMNAFDGKTIDKETGEVLHQKTHFPQPWEFFAQEVMIRVFGKPDGKPEFEEADTPEKLRTLLAEKLSSRPEAVHEYVTPLFVSRAPNRKMSGQGHMETVKSAKRLDEGVSVLRVPLTQLKLKDLEKMVNREREPKLYEALKARLEAHKDDPAKAFAEPFYKYDKAGNRTQQVKAVRVEQVQKTGVWVRNHNGIADNATMVRVDVFEKGDKYYLVPIYSWQVAKGILPDRAVVQGKDEEDWQLIDDSFNFKFSLHPNDLVEVITKKARMFGYFASCHRGTGNINIRIHDLDHKIGKNGILEGIGVKTALSFQKYQIDELGKEIRPCRLKKRPPVR

SEQ ID NO: 574 - protein, 1082 aa, Neisseria meningitidis
MAAFKPNSINYILGLDIGIASVGWAMVEIDEEENPIRLIDLGVRVFERAEVPKTGDSLAMARRLARSVRRLTRRRAHRLLRTRRLLKREGVLQAANFDENGLIKSLPNTPWQLRAAALDRKLTPLEWSAVLLHLIKHRGYLSQRKNEGETADKELGALLKGVAGNAHALQTGDFRTPAELALNKFEKESGHIRNQRSDYSHTFSRKDLQAELILLFEKQKEFGNPHVSGGLKEGIETLLMTQRPALSGDAVQKMLGHCTFEPAEPKAAKNTYTAERFIWLTKLNNLRILEQGSERPLTDTERATLMDEPYRKSKLTYAQARKLLGLEDTAFFKGLRYGKDNAEASTLMEMKAYHAISRALEKEGLKDKKSPLNLSPELQDEIGTAFSLFKTDEDITGRLKDRIQPEILEALLKHISFDKFVQISLKALRRIVPLMEQGKRYDEACAEIYGDHYGKKNTEEKIYLPPIPADEIRNPVVLRALSQARKVINGVVRRYGSPARIHIETAREVGKSFKDRKEIEKRQEENRKDREKAAAKFREYFPNFVGEPKSKDILKLRLYEQQHGKCLYSGKEINLGRLNEKGYVEIDHALPFSRTWDDSFNNKVLVLGSENQNKGNQTPYEYFNGKDNSREWQEFKARVETSRFPRSKKQRILLQKFDEDGFKERNLNDTRYVNRFLCQFVADRMRLTGKGKKRVFASNGQITNLLRGFWGLRKVRAENDRHHALDAVVVACSTVAMQQKITRFVRYKEMNAFDGKTIDKETGEVLHQKTHFPQPWEFFAQEVMIRVFGKPDGKPEFEEADTLEKLRTLLAEKLSSRPEAVHEYVTPLFVSRAPNRKMSGQGHMETVKSAKRLDEGVSVLRVPLTQLKLKDLEKMVNREREPKLYEALKARLEAHKDDPAKAFAEPFYKYDKAGNRTQQVKAVRVEQVQKTGVWVRNHNGIADNATMVRVDVFEKGDKYYLVPIYSWQVAKGILPDRAVVQGKDEEDWQLIDDSFNFKFSLHPNDLVEVITKKARMFGYFASCHRGTGNINIRIHDLDHKIGKNGILEGIGVKTALSFQKYQIDELGKEIRPCRLKKRPPVR

SEQ ID NO: 575 - protein, 67 aa, Neisseria meningitidis
MFGYFASCHRGTGNINIRIHDLDHKIGKNGILEGIGVKTALSFQKYQIDELGKEIRPCRLKKRPPVR

SEQ ID NO: 576 - protein, 220 aa, Neisseria mucosa
MRHIFSDGLKEGIETLLMTQRPALSGDAVQKMLGHCTFEPTEPKAAKNTYTAERFIWLTKLNNLRILEQGSERPLTNTERATLMDEPYRKSKLTYAQARKLLGLKDTAFFKGLRYGKDNAEASTLMEMKAYHAISRALEKEGLKDKKSPLNLSPELQDEIGTAFSLFKTDEDITGRLKTELTPASNKTLSRPFTVKSASNGSTSAPWLPSTKWFLHFKPA

SEQ ID NO: 577 - protein, 392 aa, Unknown
  Neisseria sp.
MAPFTLKPLNYILGLDIGIASVGWAVVETDSDVLPYRLIDVGVRTFDRAEVPKTGESPAAARRLARSVRRMIRRRAHRMLRARRLLKREGMLQAADFDAHGLVENLPVNPWQLRVDALSRKLMPLEWAAVLLHMVKHRGYLSQRKNERNSSDKELGALLSGVAANSEALQGGDFRTPAELAVNKFEKESGHIRNQRGDYSHTFNRKDVQAELVLLFEKQKEYGNPYISDGLLTGVEDLLMTQRAALSGDAVQKMLGRCTFEPEEYKAAKNTYSAERFVWLTKLNNLRILDQGSERPLTDSERAKLMDEPYKKTKLTYAQVRRLLELDDTAFFKGLRYSKDNAESATLMEMKAYHSISGALEKAGLKNKKIAAGLIARIAGRNRRGVFAIQNR

SEQ ID NO: 578 - protein, 701 aa, Unknown
  Neisseria sp.
MQDEIGEAFSLFKTDEDIRGRLKGKLPDEQLDALLEYVSFDKFVQLSLKALRKILPLMEQGKRYDEACAEIYGDHYGIKDDKQAQFLPPVSADEIRNPVVLRALSQARKVVNAVVRRYGSPARVHIETAREVGKSFLDRKKIEKRQEENRKDRERSIAKFREYFPNFVGEPKAKDILKMRLYEQQQGQCLYSGKAIDLRRLNEKGYVEIDHALPFSRTWDDSFNNKVLVLAGENQNKRNQTPFEWLGGDEKRWREFTARVEHCRFPRSKKQRILMQKLDEKDFKERNLNDTRYVNRFLCNFIAQNMLLTGEDKNRVFASNGQITNLLRGMWGLKKVRESNDRHHALDAVVVACSTVAMQQKITNYVRQKEMNVFDGEMVDKTTGEVSRLHFPQPWDFFRQEVMMRVFGKPDTPSENNEEADTPEKLRALLADKLSSRPEAVHEAVTPLFVSRAPSRKMSGQGHMETIKSAKRLSEGKSVLRVPLTQLTPKLLENMVNREREPQLYEDLLGRLNAHGGDPAKAFAAPFFKRDKAGNPTQQVKAVRVEDVQKSGVIVREGNGVADNATMVRVDVFEKGGKYYLMPIYTWQAAKGILPNKAVIAHTDEANWQEMDTSFTFKFALYPNDLVLASLKKETYFGYFAGLDRSTGNISLRVHDLEKSKGKDGVYRIGVKTALSFQKYQVDELGKTIRPCRLKKRPPVR

SEQ ID NO: 579 - protein, 1089 aa, Unknown
  Neisseria sp.
MTAFKPNPLNYILGLDIGIASVGWAMVEIDDKENPVRLIDLGVRVFERAEMPKTGDSLAAARRLARSVRRLTRRRAHRLLRARRLLKHEGVLKPEDFDENGLVKPLPYIPKQPRNTPWQLRAAALDRKLTPLEWAAVLLHLVKHRGYLSQRKNEGETDDKELGALLKGVADNTHALQAGNFRTPAELALNKFEKESGHIRNQRGDYSHTFSRKDLQAELVLLFEKQKEFGNPYVSDDLKNGIENLLMTQRPALSGDAIQKMLGHCTFEPAEPKAAKNTYTAERFIWLTKLNNLRILNQGNERPLTDAERTTLMDEPYKKSKLTYAQARKLLDLDDTAFFKGLRYGKDNAESATLMEMKAYHAISRALEKEGLKDKKSPLSLSPELQDEIGTAFSLFKTDEEITGRLKGCLQPEILDALLKHISFDKFVQISLKALRRIVPLMEQGKRYDEACAEIYGDHHGRRNSEETLYLPPIPADEIRNPVVLRALSQARKVINGVGRRYGSPARIHIETAREVGKSFKDRKEIEKRQEENRKDREKAAAEFQEYFPNFVGEPKSKDILKLRLYRQQNCKCLYSGKEINLGRLNEKGYVEIDHALPFSRTWDDSFNNKVLVLGSENQNKGNRTPYEYLNGKDNSREWQEFKARVETSRFPHSKKQRILLQKFDEEGFKERNLNDTRYVNRFLCKFVADHMQLTGKGKRRVFASNGQITNLLRGFWGLRKVRAENDRHHALDAVVVACSTVAMQQRITRFVRYKEMNAFDGKTVDKETGEVLHQKTHFPQPWEFFAQEVMIRVFGKPDGKPELEEADTPEKLRALLAEKLSSRPEAVHEYVAPLFVSRAPNRKMSGQGHMETIKSPKRLDEGISVVRVPLTQLKLKDLEKMVNREREPKLYEALKARLEAHKDDPAKAFAEPFYKQDKAGNRTQQVKAVRIEQVQKTGVWVRNQNGIADNATMVRVDVFEKGGKYYLVPIYSWQVAKGILPDKAIIAFKDEEEWQLIDDSFNFKFPLHPNDLVEVITKKARIFGYFASCHRGTGNINIRIHDLDNKVGKNGILEGIGVKTALSFQKYQIDELGKEIRPCRLKKRPPVR

SEQ ID NO: 580 - protein, 1097 aa, Neisseria wadsworthii
MKKQPQRYILGLDLGIASVGWALILVDGAENPVGLLDCGVRTFERAEVPKTGDSLALARRQARSVRRLIRRRAHRLLRLRRLLKREGILSAADFNSDGLPNLPIDAWQLRVAGLERKLTNQEWAAVLLHLVKHRGYLSQRKSETQTENKELGRLLAGVAENSKLLSESSEQYRTPAELAVKLFAEQSGHLRNKGGEYTHTFNRLDLQKELHLLFERQYALGNPFASAELQSKVDELLMTQRSALQGEAVLKMLGKCTFEPSEYKAAKNTYSAERFIWLTKLNNLRILYNGEERALDEGDRKKLLDEPYKKAKLTYKQVRSILNLPESAVFKGLRYGKDSDGLKAENGTLMEMKAYHKIRTILDKAGLKGEWENRIRNPEILDKIGTAFSLYKTDEDIQAALADLRLPENVLDALLAGLNFDKFIQLSLKALRNILPLMERGIRYDEACKEVYGDHRALAESKNQVLLPPIPADEIRNPVVLRTLTQARKVINAIIRRYGSPQRVHIETARELGKSKQERDKIDRKNKENQNDRNRLASDIRKHFNFEPTPKDILKLRLYEQQHGKCLYSDLREEKGECLYTGNVIELHRLFEDGYVEIDHALPLSRTWDNSLNNKVLVLKSSNQNKGNKTPYEWLDGANNSRRWREFQARVQGCHFPYVKKQRIQTAKLDSKAEQGFLERNLNDTRYISKFMCQFITANLRLAETSNALMEEVAGENPYWKERKRQRVFAPSGSIIALLRGLWGLKKVREDNDRHHALDAIVVACSTVSMQQKITKAMQRRETLETVDSETGEVKTRIPQPWDFFRQEVMIRVFSDSPREELAEKLNSRPEALHDFVSPLFVSRAPNRKMTGQGHLETVKSAKRLSENISVVRKPLTALKLKDIENIVGYPDREPALYQALRERLLAHKDDPVKAFADKPFYKPAKDGGQGSLVKAVRIIENTKHGLKIRNGITDTNGDMVRTDVYQKTDKKGKRQYFIVPVYAWQVEKNELPTVDCKGYEIDDNYEFCFSLYKYDLIEIQNPNDINQELRAYYINCDSSDGRFWLAYHDKSAKEQQFRISTQNQPIIKKYQVDTLGKEIRLCKAEKRTALNGKKKK

SEQ ID NO: 581 - protein, 1426 aa, Niabella soli
MPRKNILGLDLGTTSIGFAKIIEDDDYQCSSVELIGVRVNPLTTDEQTNFEKGKPVSVNADRTLKRGMRRNLDRYQLRRDYLIEILRTHHIITADTKLAEDGKNTTHTTYALRALAATAEIPLEAFVRVLLAINKKRGYKSSRKAKNEDEGQLIDGMAIARRLYEESLTPGQFSYQLLKEGKKYLPDFYRSDLNTELNKVWNFQKQFYPEILTDEFKRHLEGKGQRATAVAFWGQHGFSMAENKGSREEKKLHAYKWRSEAAHKQLTKEEVAFVITEINNDLNKSSGYLGAISDRSKELFFNKQTVGQYLHQQLKENPHTRLKGQVFYRQDYLDEFETIWEMQAKFYSALTLELKEEVRDVVIFYQRKLKSQMGLISLCEFESKEIEIEKNGEKAKKRIGLRVAPKSSPLFQEFKIWQVLNNLEFRNKKTKEVFVPEMAAKQQLFDELNIKGNLLASEAIKILGYKTKDWEANYHTLEGNRTNKSLYDAWLKILELEGYDENLLKLSGSDDIDVSKIEKPALEIRQMVLAVFEVLGISGAILDFDAEADGKAFEQQPAYQLWHLLYSAEDDGKKYSQEDIFTYGHDNIGLKKKLCEKFGFRPEHTKILVNVVFSDDYGNLSSKAMRRIYPFIKELTYDKACAEAGYRHSAASLTKEEIAARPLQNRLDLLKKNELRSPVVEKILNQMVNVVNTLVDDENQNRKARGLSEDFHFDEIRIELARELKKNAKERAEMTTNINTAKQSHEKIIRILQTEFGVPNPSRNDIVRYKLYEELKNNGYKDLYTNTYISRDILFSKQIDVDHIIPQMSLFDDSFSNKTVVFRKDNQDKGNKTAYDYILGKYGEQALEEYISRITSLFELGKKNKEEGIGKAKFQKLQKRLVDIGDGFIERDLRESQYIAKKANNMLYAICRSVVSTSGEITARLREDWDLVNVMQEINLPKFRALGLTEMVEKKDGAQKERITDWTKRNDHRHHAMDALAIAFTRHSHIQYLNHLNARKDEANKWHPVVSKIEEKETVLIYDDLGNRKRKFKAPMPNFREVVKEHLENVLISHKAKNKVVTKNKNKIKTVRGEKVKTELTPRGQLHKETIYGRYRYYESKEEKIGPKFDAEMIGMVTNPQYKKLLLERLAANGNDPKKAFWGKNALNKNPLYVDEARQELLPEKILLRWLNDDYSIRKDVTPENLKDIKTIEKILDKGVKKILLKRLADFGNDPKKAFSDLDKNPIWQNEAKRIAIKRVTISGIKNAAPLHHKKDHLGNDILDEKGKQIPSSFVSTGNNHHVAIYRDAEGNLQERVVSLFDAVQLVNGGEPVIDKEYNKGIGWQFLFTMKQNEMFVFPDEKTGFNPREVDLLSSGNRKLISPNLFRVQKLASKNYFFRHHLETSVEEKKELKNIAYKPQLGLNALSNIVKVRINHIGEIVSVGEY

SEQ ID NO: 582 - protein, 79 aa, Nitritalea halalkaliphila
MPLRLPERVYKMISSTGAECHFLPVNVSSLIKGYDAKSKLGEFGSQNKQEVTSDSFIRVKERCYKLEINRLGIPLNRLK

SEQ ID NO: 583 - protein, 1498 aa, Odoribacter laneus
METTLGIDLGTNSIGLALVDQEEHQILYSGVRIFPEGINKDTIGLGEKEESRNATRRAKRQMRRQYFRKKLRKAKLLELLIAYDMCPLKPEDVRRWKNWDKQQKSTVRQFPDTPAFREWLKQNPYELRKQAVTEDVTRPELGRILYQMIQRRGFLSSRKGKEEGKIFTGKDRMVGIDETRKNLQKQTLGAYLYDIAPKNGEKYRFRTERVRARYTLRDMYIREFEIIWQRQAGHLGLAHEQATRKKNIFLEGSATNVRNSKLITHLQAKYGRGHVLIEDTRITVTFQLPLKEVLGGKIEIEEEQLKFKSNESVLFWQRPLRSQKSLLSKCVFEGRNFYDPVHQKWIIAGPTPAPLSHPEFEEFRAYQFINNIIYGKNEHLTAIQREAVFELMCTESKDFNFEKIPKHLKLFEKFNFDDTTKVPACTTISQLRKLFPHPVWEEKREEIWHCFYFYDDNTLLFEKLQKDYALQTNDLEKIKKIRLSESYGNVSLKAIRRINPYLKKGYAYSTAVLLGGIRNSFGKRFEYFKEYEPEIEKAVCRILKEKNAEGEVIRKIKDYLVHNRFGFAKNDRAFQKLYHHSQAITTQAQKERLPETGNLRNPIVQQGLNELRRTVNKLLATCREKYGPSFKFDHIHVEMGRELRSSKTEREKQSRQIRENEKKNEAAKVKLAEYGLKAYRDNIQKYLLYKEIEEKGGTVCCPYTGKTLNISHTLGSDNSVQIEHIIPYSISLDDSLANKTLCDATFNREKGELTPYDFYQKDPSPEKWGASSWEEIEDRAFRLLPYAKAQRFIRRKPQESNEFISRQLNDTRYISKKAVEYLSAICSDVKAFPGQLTAELRHLWGLNNILQSAPDITFPLPVSATENHREYYVITNEQNEVIRLFPKQGETPRTEKGELLLTGEVERKVFRCKGMQEFQTDVSDGKYWRRIKLSSSVTWSPLFAPKPISADGQIVLKGRIEKGVFVCNQLKQKLKTGLPDGSYWISLPVISQTFKEGESVNNSKLTSQQVQLFGRVREGIFRCHNYQCPASGADGNFWCTLDTDTAQPAFTPIKNAPPGVGGGQIILTGDVDDKGIFHADDDLHYELPASLPKGKYYGIFTVESCDPTLIPIELSAPKTSKGENLIEGNIWVDEHTGEVRFDPKKNREDQRHHAIDAIVIALSSQSLFQRLSTYNARRENKKRGLDSTEHFPSPWPGFAQDVRQSVVPLLVSYKQNPKTLCKISKTLYKDGKKIHSCGNAVRGQLHKETVYGQRTAPGATEKSYHIRKDIRELKTSKHIGKVVDITIRQMLLKHLQENYHIDITQEFNIPSNAFFKEGVYRIFLPNKHGEPVPIKKIRMKEELGNAERLKDNINQYVNPRNNHHVMIYQDADGNLKEEIVSFWSVIERQNQGQPIYQLPREGRNIVSILQINDTFLIGLKEEEPEVYRNDLSTLSKHLYRVQKLSGMYYTFRHHLASTLNNEREEFRIQSLEAWKRANPVKVQIDEIGRITFLNGPLC

SEQ ID NO: 584 - protein, 1389 aa, Oenococcus kitaharae; identical to SEQ ID NO: 241

SEQ ID NO: 585 - protein, 1535 aa, Ornithobacterium rhinotracheale
MNTILGLDLGTNSIGWALIKVLNDKTRLPLEIIDLGVVVIPTDQRTLDKFSKGESISKTAERTKQKGVRKLYERKKLRRERLHRVLNILGFLPEHYSKKIDFKKHLGQFFGNSQPKISYVENDHGKHEFIFMDSYREMLKEFSKHNIKNVPYDWTIYYLRKKALSQKISKEELAWVILNFNKKRGYYQFRDDNADENKENKIEKYYALKVTNVKKEDAQNYTITLENGWIYKNKSKISLLDWVGSTKEFISTEKFDNKGNIIKKKNGEDDRTLKLVDSEKDWIAIKKSTEDRIENYGKTVGTYLYEHLLKDPNQKLNGELINIIDRKFYKNELKQILEKQKEFHPELLNEDLFQKSIIELYPKNSTRQKELKNKDLCYLLIDDVIYYQRDLKKKNSTINKCSFESREYYLNGEKQIQKINCIAKSKPLYQEFRTLQFIKNLKVYEIIDGLEKDITSKLLPDFETKEHFFEWLNDKEKIDQLQLLSYKCFDLHDNVKNDLIAKGIKRPTEKAIRTELLEKYRWNYSKDNDRNFLLNETRFKILKYLKKVDKKLTLTNEQIESLWLLLYSAKDERELKNGLQKFSEKNKLPKKFSDIFISFPPFKKEYGAYSEKALKKLLSLVRFGKYWSFNKIDNNIQNKIMNILNGEVDDSISDRVREKTILLQDKNDFQDLPLWLASYVAYNRFSEVSEIKYWDSPDKIEFLKQHSIGNPIVEKIINETLKLIKDIWVIHGKSCKNFFSEIHIELSREIKSSSKKRAQITNNNTKNQKLNNLIKSLLIEMASDTKYENVTPYSPSQQEILKIYDEGIYSKEENSEKIKEINKIRNNNKISKSDITKYKLWLEQGYISPYTGKIIPLTKLFTAKYQKEHIIPQTKFFDDSFNNKVICEAEVNKLKDNSLAMNFIKAKGGKAVKLSDGETVTILNQEEYKQLVRTSFKKNSIKLRNLLLEEIPDTFTKRQLNDTKYISKLVLSLLSNIVREKGELESTAKRIVSTNGQITSILRNDWGLNNIWNKLITPRFERLNNINKNKIYGNWENKKGKNVFQINYLNDNLSTLNTKRIDHRHHALDALIVACTTRNHINFLNNQYAKSRNQRHDLRAKLKRRETITTEGSKKQVFKDFIKPWESFTQDALKKLETTIVNFKVNKRIINKTINWYKKWEKQKDGTYKKIQKKQTKGDAWAIRKPLHIDTIYGIVCKKLPLKSALENYKNIIDENLKHKIKELKEVNKFDNNQIINFFKECNFIFEDNNIQKVEVYDFKDNRDKTILSSSRQLIDESFTPKKIGKVLDPTIRNILLKHLNSTKYNNKFDSDGNPIKPEKLAFSPEGLKDLNKNIKHLNNNKEHQPIKRVKLFETLGNKIKVGYTQQKNKKFAETATGTNLFLGIYSDNNKRDFKTIPLILAIQREKEGLNPCPDTDEKGNQLLFSLSPNELVFVPNNEERKNPNLVDFENLSKDQIDRIYKFVSCTGSEAYFVPSRTAKPIIENENGTNNKSQRIIEFNEKTSIKNEKNEPVLIKTICWKIEVNRLGKIIKVIK

SEQ ID NO: 586 - protein, 103 aa, Parabacteroides merdae
MIVYRLFYRFLFKATKLVNFVIHKELKRQIARTGKIKFHSGGCGCQSGNYKMQNFEKGKSITTNADRTLKRSMRRNLYRCKLRRDVLIELLKKVGFIPEKQWK

SEQ ID NO: 587 - protein, 82 aa, Parabacteroides merdae
MSIWKLQYPPLDLKIYNKFLVYSRVNPLTVDEMQNFEKGKSITTNADRTLKRSMRRNLQRYKLRRDVLIELLKKVGFMSEKQ

SEQ ID NO: 588 - protein, 84 aa, Parabacteroides merdae
MSIWKLQYPPLDLKIYNKFLVYSRVNPLTVDEMQNFEKGKSITTNADRTLKRSMRRNLYRCKLRRDVLIELLKKVGFIPEKQWK

SEQ ID NO: 589 - protein, 398 aa, Pasteurella bettyae
MLANENQNKGNLTPYEWLDGKNNSKRWQDFVARVQTCCFSHRKKQHILSHKLDEKSFIERNLNDTRYVARFLCNFIADNMLLTGKGKRKVFASNGQITALLRGRWGLQKVRDDNDRHHALDAVVIACSTVAMQQKITRFVKYEEGNVFSGERIDRETGEIIPLYFPTPWKFFKENVEIRIFSENPKLELENRLPDYPQYNHEFVQPLFVSRMPTRKMTGQGHMETIKSAKRLDEGISVLKVPLTQLKLADLENMVNRERELALYEALKERLELFGNDPAKAFIEPFYKKGGALVKAVRVKKVQKSGVLVRDGNGVADNALMVRVDVFTKGGKYFLVPIYTWQVAKGILPNKAVTANIDEIDWLEMDESYQFIFTMYPNDLVKVKLKKEEFFGYYGGLD

SEQ ID NO: 590 - protein, 610 aa, Pasteurella bettyae
MNMLKPLNYILGLDLGIGSVGWAVVEIDEQGNPLRLIDVGVRTFERAEVAKTGESLALARRLARSSRRLVKRRAARIKKAKRLLKAENILLSVDEILPNDVWQLRVKGLDHKLERQEWAAVLLHLLKRRGYLSQRKNESKSENKELGALLSGVVTNHQILQTDEYRTPAEIAVHKFQAEDGHIRNQRGDYTHTFSRLDLLAEMELLFQRQTELGNLHTSSKLLENLTALLMWQKPALAGEAILKMLGKCTFEPTEYKAAKNSYSAERFVWLTKLNNLRILEQGAERALTDSERFVLLDQPYEKAKLTYAQVRTLLKLSDEAIFKGVRYQGEDKKTVESKTTLMEMKAYHQIRKALDGADLKDEWNTLKNDSALLDEIGTAFSLYKTDDDISHYLGGKLSEKVLNVLLENLNFDKFIQLSLKALQKILPLMLQGQRYDEAVSAVYGDHYGKKSAESCRLLPAIPANEIHNPVVLRTLTQARKVINAVVRLYGSPARIHIETGRKVGKSYQDRKKLEKQQEENREQRESAVKKFKEYFPNFVGEPKGKDILKLRLYELQQSKCLYSGKSFDPNRLLEKGYVEVDHALPFSRTWDDSFNNKVCLPMKTRIKAI

SEQ ID NO: 591 - protein, 199 aa, Pasteurella multocida
MACATPSMQQKITRFIRFKEVHPYKIENRYEMVDQESGEIISPHFPEPWAYFRQEVNIRVFDNHPDTVLKEMLPDRPQANHQFVQPLFVSRAPTRKMSGQGHMETIKSAKRLAEGISVLRIPLTQLKPNLLENMVNKEREPALYAGLKARLAEFNQDPAKAFTTPFYKQGGQQVKAIRVEQVQKSGVLVRENNGVADNA

SEQ ID NO: 592 - protein, 63 aa, Pasteurella multocida
MQTTNLSYILGLDLGIASVGWAVVEINENEDPIGLIDVGVRIFERAEVPKTGESLALSRRLAR

SEQ ID NO: 593 - protein, 1058 aa, Pasteurella multocida
MQTTNLSYILGLDLGIASVGWAVVEINENEDPIGLIDVGVRIFERAEVPKTGESLALSRRLARSTRRLIRRRAHRLLLAKRFLKREGILSTTDLEKGLPNQAWELRVAGLERRLSAIEWGAVLLHLIKHRGYLSKRKNESQTNNKELGALLSGVAQNHQLLQSDDYRTPAELALKKFAKEEGHIRNQRGAYTHTFNRLDLLAELNLLFAQQHQFGNPHCKEHIQQYMTELLMWQKPALSGEAILKMLGKCTHEKNEFKAAKHTYSAERFVWLTKLNNLRILEDGAERALNEEERQLLINHPYEKSKLTYAQVRKLLGLSEQAIFKHLRYSKESAESATFMELKAWHAIRKALENQGLKDTWQDLAKKPDLLDEIGTAFSLYKTDEDIQQYLEGKLPDSVINALLVSLNFDKFIELSLKSLRKILPLMEQGKRYDQACHEIYGHHYGEKNQQISQLLPVIPTQEIRNPVVLRTLSQARKVINAIIRQYGSPARVHIETGRELGKSFKERREIQKQQEDNRTKRESAVQKFKELFSDFSSEPKSKDILKFRLYEQQHGKCLYSGKEINIHRLNEKGYVEIDHALPFSRTWDDSFNNKVLVLASENQNKGNQTPYEWLQGKINSERWKNFVALVLGSQCSAAKKQRLLTQVIDDNKFIDRNLNDTRYIARFLSNYIQENLLLVGKNKKNVFTPNGQITALLRSRWGLIKVRENNDRHHALDAIVVACATPSMQQKITRFIRFKEVHPYKIENRYEMVDQESGEIISPHFPEPWAYFRQEVNIRVFDNHPDTVLKEMLPDRPQANHQFVQPLFVSRAPTRKMSGQGHMETIKSAKRLAEGISVLRIPLTQLKPNLLENMVNKEREPALYVGLKARLAEFNQDPAKAFATPFYKQGGQQVKAIRVELVQKSGVLVRQGNGVADNAPGSIVRTDVFIKNNKFFLVPIYTWQVAKGILPNKAIVAHKNEDEWEEMDEGAKFKFSIFPNDLIELRTKTECFLGYYIGPDRHNGSISLREHDSEISKGNAGVYRVGVKLALSLEKYHIDELGKNRRICRPHQRRPVR

SEQ ID NO: 594 - protein, 1056 aa, Pasteurella multocida
MQTTNLSYILGLDLGIASVGWAVVEINENEDPIGLIDVGVRIFERAEVPKTGESLALSRRLARSTRRLIRRRARRLLLAKRFLKREGILSTTDLEKGLPNQAWELRVAGLERRLSAIEWGAVLLHLIKHRGYLSKRKNESQTNNKELGALLSGVAQNHQLLQSDDYRTPAELALKKFAKEEGHIRNQRGAYTHTFNRLDLLAELNLLFAQQHQFGNPHCKEHIQQYMTELLMWQKPALSGEAILKMLGKCTHEKNEFKAAKHTYSAERFVWLTKLNNLRILEDGAERALNEEERQLLINHPYEKSKLTYAQVRKLLGLSEQAIFKHLRYSKENAESATFMELKAWHAIRKALENQGLKDTWQDLAKKPDLLDEIGTAFSLYKTDEDIQQYLTNKVPNSVINALLVFLNFDKFIELALKSLRKILPLMEQGKRYDQACREIYGHHYGEANQKTSQLLPAIPAQEIRNPVVLRTLSQARKVINAIIRQYGSPARVHIETGRELGKSFKERREIQKQQEDNRTKRESAVQKFKELFSDFSSEPKSKDILKFRLYEQQHGKCLYSGKEINIHRLNEKGYVEIDHALPFSRTWDDSFNNKVLVLASENQNKGNQTPYEWLQGKINSERWKNFVALVLGSQCSAAKKQRLLTQVIDDNKFIDRNLNDTRYIARFLSNYIQENLLLVGKNKKNVFTPNGQITALLRSRWGLIKIRENNDRHHALDAIVVACATPSMQQKITRFIRFKEVHPYKIENRYEMVDQESGEIISPHFPEPWAYFRQEVNIRVFDNHPDTVLKEMLPDRPQANHQFVQPLFVSRAPTRKMSGQGHMETIKSAKRLAEGISVLRIPLTQLKPNLLENMVNKEREPALYAGLKARLAEFNQDPAKAFTTPFYKQGGQQVKAIRVEQVQKSGVLVRENNGVADNASIVRTDVFIKNNKFFLVPIYTWQVAKGILPNKAIVAHKNEDEWEEMDEGAKFKFSLFPNDLVELKTKKEYFFGYYIGLDRATGNISLKEHDGEISKGKDGVYRVGVKLALSFEKYQVDELGKNRQICRPQQRQPVR

SEQ ID NO: 595 - protein, 134 aa, Pasteurella multocida
MVNKEREPALYAGLKARLAEFNQDPAKAFTTPFYKQGGQQVKAIRVEQVQKSGVLVRENNGVADNASIVRTDVFIKNNKFFLVPIYTWQVAKGILPNKAIVAHKNEDEWEEMDEGAKFKFSLFPNDLVELKTKK

SEQ ID NO: 596 - protein, 53 aa, Pasteurella multocida
YSKENAESATFMELKAWHAIRKALENQGLKDTWQDLAKKPDLLDEIGTAFSLL

SEQ ID NO: 597 - protein, 1366 aa, Pediococcus acidilactici
MGDRKYNLGLDIGTSSIGFAAVDENNQPIRVKGKTAIGVRLFEEGKTAADRRGFRTTRRRLSRRRWRINLLNEIFDAHLAEVDPTFLARLKESNRSNLDPKKSFQGSLLFPERKDYQFYEEYPTIYHLRKALMEEDRKFDIREIYLAVHHIIKYRGNFLNGTPMRSFKVENIELDTLFDQLNQLYAEIVPDNELAFDLAQVADVKDVLSSTTIYKMDKKKQLVKMMLLPASNKALQSENKKIVTQFVNAILNYKFKLDVLLQVETDADWSLKLNDEGADDKLEEFTGDLDENRLEIIDLLQRLHNWFSLNEITKDGNSLSAAMVEKYENHHHHLGLLKKVIENHPDAKKAKALKETYTAYVGKTDDKTQNQDDFYKAVEKNLDDSPDAKEIKRLIQLDQFMPKQRTGQNGAIPHQLHQQELDQIIEKQSKYYPFLAEPNPNVKRRKDAPYKLDELIAFKIPYYVGPLVTPEEQAQNKENVFAWMKRKAAGPITPWNFDEKVDRMESANRFIRRMTTKDTYLFGEDVLPAESMIYQKFVVLNELNNLKINGRHLSLKDKQDVYNDLFKQQKTVSIKALQNYYVTKKKAATAPTVGGLADPKKFLSSLSTYIDFKNMFGERVNDPQFQEDLEQIVEWSTIFEDRGIFKAKLQALGWLSEKQIQQLVAKRYKGWGRLSKKLLTGLKNAEGYSILDEMWRSTENFMQIQTRPEFAALIQQANEKQFEGNDPNNVWENIESILGDAYTSPQNKKAIRQVVKVVQDIEKAVGNPPEKIAIEFTREAAANPQRTQSRLRTLEKLYESAEEVVDAGLTAELAEFKENKHVLSDKYYLYFTQLGRDVYTGDTISLDKLNDYDVDHILPQSFIKDDSLDNRVLTIRAVNNGKSDNVPAKMFGKKMGSFWRYLLDNGMISKRKYNNLITDPDNISKYAQKGFINRQLVETSQVIKLTANILNGIYDKDTEIIEVPAKMNSQMRKMFDLVKVREVNDYHHAFDAYLTIFIGKYLYKCYPKLRPYFVYGKFKKFGDNEDIEVGDGRFNFLNRIERLKNVTDPETGEILWSNVAPNETIKQIKKVYNYKFMLVSRETTTRRAELFNQTVYPKNYRGKLIPIKEDRPTDLYGGYSGNTDAYLAIVALEDKKKGKYFKVVGIPTRAAAKLEKLKQQDSQQYLQALHKVIAPQFTKSTKKGIKKTEFEIVLDKVHYRQLVQDGPVKMMLGSSTYKYNAKQLVLSEKALQVIADDRKFDETQKDDNLIAVYDEILSIVNQSFDLYDINGFRKKLNDNRDQFIDLPAETKYEGRKVVAHGKREMILEILKGLHANAAFGNLKPIGFSTAFGQLQVPNGIILSKNAILIHQSPSGLFERKIKLSDL

SEQ ID NO: 598 - protein, 1229 aa, Pediococcus acidilactici; identical to SEQ ID NO: 130

SEQ ID NO: 599 - protein, 270 aa, Pediococcus lolii
LFNQTIYSAKASKTMIPIKNDRPTKLYGGYSGNEDAYMSIIRLSDKKKTYKVVGISMRDASKLKAYENNAHEEYLKKLKEVIEQQFLDSGKKTKADFEIVIPKVNYHQRMQDGTKQFRIGSSKYVHNTKQLVLSEKTLKAIRNNKQYNGDAEKDLINAFDEILTIVNDSFSIFDIRSFRKKLNESRDKFVSLPVEDTKEKSKVIKGKRETLKQILIALHANGTSQDIPQLGLKSFGKMVKTGGLTLSENTALIHQSPSGLFEHKIKLSDL

SEQ ID NO: 600 - protein, 1016 aa, Pediococcus lolii
MNGIFDAHLAEVDPTFLARLKESNRSNLDPKKSFQGSLLFPERKDYQFYKEYPTIYHLRKALMEKDRKFDIREIYLAVHHIIKYRGNFLNGTPMRSFKVENIELDTLFDRLNQLYEEIIPDNELAFDLEQVADVKEVLSSTTIYKMDKKKQLVKMMLLPASNKALQSENKKIVTQFVNAILNYKFKLDVLLQVETDADWSLKLNDEGADDKLEEFTGDLDENRLEIIDLLQRLHNWFSLNEITKDGNSLSAAMVEKYKDHRHHLELLKKVIEDHSDAKKAKALKETYTAYVGKTDDKTQNKDDFYKAVEKNLDDSPEAKEIKRLIQLDQFMPKQRTGQNGAIPHQLHQQELDQIIEKQSKYYPFLAEPNPNVKRRKDAPYKLDELIAFKIPYYVGPLVTPEEQAQNKENVFAWMKRKAAGPITPWNFDEKVDRMESANRFIRRMTTKDTYLFGEDVLPAESMIYEKFVVLNELNNLKINGRHLSLKDKQDIYNDLFKQQKTVSIKALQNYYVTKKKAATAPTVGGLADPKKFLSSLSTYIDFKNMFGERVNDPQFQEDLEQIVEWSTIFEDRGIFKAKLQALGWLSEKQIQQLVAKRYKGWGRLSKKLLTGLKNAEGYSILDEMWHSTENFMQIQTRPEFAALIQQANEKQFEGNDPDNVWENIENILGDAYTSPQNKKAIRQVVKVVQDIEKAVGNPPEKIAIEFTREAAANPQRTQSRLRTLEKLYESAEEVVDAGLTAELAEFKENKHVLSDKYYLYFTQLGRDVYTGDTISLDRLNDYDVDHILPQSFIKDDSLDNRVLTIRAVNNGKSDNVPAKMFGKKMGSFWRYLLDNGMISKRKYNNLITDPDNISKYAQKGFINRQLVETSQVIKLTANILNGIYDKDTEIIEVPAKMNSQMRKMFDLVKVREVNDYHHAFDAYLTIFIGNYLYKCYPKLRPYFVYDNFKKFGNKEDIGHKRFNFLGKIERDKKVVAPETGEILWSNVAPNETIKQIKKVYDYKFMLTSHETYTKHG

SEQ ID NO: 601 - protein, 1333 aa, Planococcus antarcticus
MKNYTIGLDIGVASVGWVCIDENYKILNYNNRHAFGVHEFESAESAAGRRLKRGMRRRYNRRKKRLQLLQSLFDSYITDSGFFSKTDSQHFWKNNNEFENRSLTEVLSSLRISSRKYPTIYHLRSDLIESNKKMDLRLVYLALHNLVKYRGHFLQEGNWSEAASAEGMDDQLLELVTRYAELENLSPLDLSESQWKAAETLLLNRNLTKTDQSKELTAMFGKEYEPFCKLVAGLGVSLHQLFPSSEQALAYKETKTKVQLSNENVEEVMELLLEEESALLEAVQPFYQQVVLYELLKGETYVAKAKVSAFKQYQKDMASLKNLLDKTFGEKVYRSYFISDKNSQREYQKSHKVEVLCKLDQFNKEAKFAETFYKDLKKLLEDKSKTSIGTTEKDEMLRIIKAIDSNQFLQKQKGIQNAAIPHQNSLYEAEKILRNQQAHYPFITTEWIEKVKQILAFRIPYYIGPLVKDTTQSPFSWVERKGDAPITPWNFDEQIDKAASAEAFISRMRKTCTYLKGQEVLPKSSLTYERFEVLNELNGIQLRTTGAESDFRHRLSYEMKCWIIDNVFKQYKTVSTKRLLQELKKSPYADELYDEHTGEIKEVFGTQKENAFATSLSGYISMKSILGAVVDDNPAMTEELIYWIAVFEDREILHLKIQEKYPSITDVQRQKLALVKLPGWGRFSRLLIDGLPLDEQGQSVLDHMEQYSSVFMEVLKNKGFGLEKKIQKMNQHQVDGTKKIRYEDIEELAGSPALKRGIWRSVKIVEELVSIFGEPANIVLEVAREDGEKKRTKSRKDQWEELTKTTLKNDPDLKSFIGEIKSQGDQRFNEQRFWLYVTQQGKCLYTGKALDIQNLSMYEVDHILPQNFVKDDSLDNLALVMPEANQRKNQVGQNKMPLEIIEANQQYAMRTLWERLHELKLISSGKLGRLKKPSFDEVDKDKFIARQLVETRQIIKHVRDLLDERFSKSDIHLVKAGIVSKFRRFSEIPKIRDYNNKHHAMDALFAAALIQSILGKYGKNFLAFDLSKKDRQKQWRSVKGSNKEFFLFKNFGNLRLQSPVTGEEVSGVEYMKHVYFELPWQTTKMTQTGDGMFYKESIFSPKVKQAKYVSPKTEKFVHDEVKNHSICLVEFTFMKKEKEVQETKFIDLKVIEHHQFLKEPESQLAKFLAEKETNSPIIHARIIRTIPKYQKIWIEHFPYYFISTRELHNARQFEISYELMEKVKQLSERSSVEELKIVFGLLIDQMNDNYPIYTKSSIQDRVQKFVDTQLYDFKSFEIGFEELKKAVAANAQRSDTFGSRISKKPKPEEVAIGYESITGLKYRKPRSVVGTKR

SEQ ID NO: 602 - protein, 211 aa, Porphyromonas catoniae
MGKKVLGLDLGVGSIGWCLITLDKDEKPQSILGMGSRIVPLSADDATEFTQGKAITKNKMRTVARTIRKGMDRYQLRREALKKVLREHAMLPDEALIKLPLLELWELRARAATPGEQVSLTELGRVLLHINQKRGYKHAKADEAAEAETKKGKETGYVAQVKGRYQILKEKGLTIGQHFAGELRANQQTAPRGTYYTYRIKEQVYPRVRGV

SEQ ID NO: 603 - protein, 1009 aa, Porphyromonas catoniae
MRIIREAYIEEYDRIMAVQRVFYPELLTDALIGRIRDRIIFYQRPLKSCKQLVSFCEFEKKEKVIRVKHTNKEGVQELVEKTITIGPKVAPKSSPIFQVCKVWESIHNIRLYHPDGTERKLEQEEKQKLFDYLQRNDKLSLTTLRKELKIKPKDKLWCDKLLEKGIAGNTTAAILRKAFKGYEHYERLFRFDLVRRDSHEADEDGVIRPIIDESYQNEPLYKLWHILYSIEDRAEMRSALIGQLGIKAEDLDNGLMDALYKIDFVKQGYGNKSAKFICKLLPHLQEGKMYSEAAEAAGMRHSDSMTAQERDERNLLEEIPLLQKNALRQPVVEKVLNQMINLVNALKREHGEIDEVRVELARELKMSREEREKATKNNSSREKENKAIAERITEYGLTPTKSRIQKYRLWQESAESCIYCGKRVDVVQFLRGEETEVEHIIPKSILFDDSLSNKACACRSCNQEKGNRFAMEYIQAKGWEQDYIERVDSLFHDKKISYSKRQHLLMLPKDLPEDFIERHLRLSQYISREAQGILRKGIRLVSASEGGVTAKLRQLWGYDNILRDLNLERYKSMGETEVVTVEHRDGQRTDERIKDWSKRKDHRHHAIDALVVACTRQSYIQRLNRVNAEADRQEMDAFIKEQQQEHKLSKKEKLSLLENWLKEQPHFTTGEVKEHAEGILISFRPGKRTVSRGRNIYKRSGKTDVQRNVLIPRGALSEETVYGVISVDGENKVVCKYPLQKFLDTKETNVDKIADQAAEKIVDKVLREKIRERIKRYGKKEAFAEPLYLDEAQTQVVRSVRCFISKDQAKLIPLRYNDESEAVGFVAPGNNHHLALYRDASGKMRASVVSFFAAVERARYGIPMIVLNPRETREKARIIPDLPESIFSKLPEEDWVLEETLQEGEMVLLGMENDAIEEAIKKKDYSKLSRYLYRVQSLSYNDYKFCFHLETESEKKEKKKGEDKKRGEKAKNTAVMPPKRYRIRCLATYQEDLNPRKVKIDLLGRISLA

SEQ ID NO: 604 - protein, 1197 aa, Unknown
  Porphyromonas sp.
MLMSKHVLGLDLGVGSIGWCLIALDAQGDPAEILGMGSRVVPLNNATKAIEAFNAGAAFTASQERTARRTMRRGFARYQLRRYRLRRELEKVGMLPDAALIQLPLLELWELRERAATAGRRLTLPELGRVLCHINQKRGYRHVKSDAAAIVGDEGEKKKDSNSAYLAGIRANDEKLQAEHKTVGQYFAEQLRQNQSESPTGGISYRIKDQIFSRQCYIDEYDQIMAVQRVHYPDILTDEFIRMLRDEVIFMQRPLKSCKHLVSLCEFEKQERVMRVQQDDGKGGWQLVERRVKFGPKVAPKSSPLFQLCCIYEAVNNIRLTRPNGSPCDITPEERAKIVAHLQSSASLSFAALKKLLKEKALIADQLTSKSGLKGNSTRVALASALQPYPQYHHLLDMELETRMMTVQLTDEETGEVTEREVAVVTDSYVRKPLYRLWHILYSIEEREAMRRALITQLGMKEEDLDGGLLDQLYRLDFVKPGYGNKSAKFICKLLPQLQQGLGYSEACAAVGYRHSNSPTSEEITERTLLEKIPLLQRNELRQPLVEKILNQMINLVNALKAEYGIDEVRVELARELKMSREERERMARNNKDREERNKGVAAKIRECGLYPTKPRIQKYMLWKEAGRQCLYCGRSIEEEQCLREGGMEVEHIIPKSVLYDDSYGNKTCACRRCNKEKGNRTALEYIRAKGREAEYMKRINDLLKEKKISYSKHQRLRWLKEDIPSDFLERQLRLTQYISRQAMAILQQGIRRVSASEGGVTARLRSLWGYGKILHTLNLDRYDSMGETERVSREGEATEELHITNWSKRMDHRHHAIDALVVACTRQSYIQRLNRLSSEFGREDKKKEDQEAQEQQATETGRLSNLERWLTQRPHFSVRTVSDKVAEILISYRPGQRVVTRGRNIYRKKMADGREVSCVQRGVLVPRGELMEASFYGKILSQGRVRIVKRYPLHDLKGEVVDPHLRELITTYNQELKSREKGAPIPPLCLDKDKKQEVRSVRCYAKTLSLDKAIPMCFDEKGEPTAFVKSASNHHLALYRTPKGKLVESIVTFWDAVDRARYGIPLVITHPREVMEQVLQRGDIPEQVLSLLPPSDWVFVDSLQQDEMVVIGLSDEELQRALEAQNYRKISEHLYRVQKMSSSYYVFRYHLETSVADDKNTSGRIPKFHRVQSLKAYEERNIRKVRVDLLGRISLL

SEQ ID NO: 605 - protein, 1422 aa, Prevotella denticola
MTQKVLGLDLGTNSIGSSVRNLDLSDDLKGQLEFFSSDIFRSSVNKESNGREYSLAAQRSAHSRSRGLNEARRRKLWATLDLLIKYGFCPMSPESLMRWRTYDKQRGLFREYPIDDKNFNAWILLDFDGDGKPDYSSPYQLRRELVIRQFDFDQPIERYKLGRALYHIAQHRGFKSSKGETLSQQETNSKQSLTDDTADVAGEMKASEEKLSKGLSTYMKENNLLTVGAAFAQLEDEGVRVRNNNDYRAIRSQFQREIETIFKFQQGLSVENELYERLVSEKKNIGTIFYKRPLRSQRGNVGKCTLERTKPRCAIGHPLFEKFRAWTLINNIKVRMSEEEQAEQLPMKLRFELYNDCFLAFVRAEFKFEDIRKYLEKRLGVHFSYNDKTINYKDSTSVAGCPITARFRKLLGEDWESFHVDGQKQRQAHGKNNASFHTVSYSTNDIWHFCYDAEEPEAVLSFAQDNLKWEKKKAEELVRIWSAIPQGYAMLSQKAIRNINKMLILGLKYSDAVLLAKVPEIVEITDGEILSVTEDYHRVEAQVGYEKQINNIVNALIAKYKSASEEYRFADHNYEYQLDKSDEKDIIKQIESNIGTRKWSLLDADEQTDILQKVRDKYQNFFRSHERKFVESPKLGECFEEYLMKKFPMVEGERWKKLYHPSQIAIYRPVPANKDRSALRLGNPDIGAIKNPTVLRVLNTLRKRVNQLLDDGIISPDETRVVVETARELNDANRKWALDTYNRIRHDENEKIKKILAEFYPKRDNISTVDIDKARYVIDQREMDYFTEAKTYHKDIKKYKLWLEQGGQCMYTGRTINLSNLFDPNSFDVEHTIPESISFDSSDMNLTLCDAHYNRFIKKNHIPADLPNYDKSVVIDGKEYSPIKPRLQRWADRVERLNRNVEYWRGQARRAQNKDRKDQCMREMHLWKMELEYWTKKLERFTITEVTDEFKNSQLVDTRVITRHAVLYLKSIFPHVDVQRGDVTAKFRKILGIQSVDEKKDRSLHSHHAIDATTLTIIPGAAKRERMLELFAKIEEVNKMLSFSGNEDRTGLKQELDGLKNQLNKEVKACRIGHNVSEIGTFINDNIIINHHVKNQALTPVRRRLRKRGHIVGGMDNPRWQTGDALRGEIHKASYYGAITQYAKDKEGKVLMKEGRPQINPTIKFVIRRELKYKKSSTDSGFASWDDLGKAIVDKELFALMKGQFPEGTSFKDACEQGIYMIKKGKNGEVDTKLYRIRHIRCKTKQKNALKIKEQAYKSEKEYKRYFYAAVGDLYAMCCYTNGKTREFKIYSLYDISCHRKVGVEDIPEFITDKKGNRLMLDYKLHTGDMILLYKENPEELYDLDNVSLSKLLYKINGFENDGLRIRMVNHLVAKEAMGESVKDYAKLPDIIRCGVKTIKFLVMGENRDFVIKNGKISFNHR

SEQ ID NO: 606 - protein, 443 aa, Prevotella disiens
MELDYWKGKYNRFTMTEIPEGFSRRQGMGIGLISRYAGLYLKTIFHKKDNPQKSNVYIVKGSITAEFRRIWNIQDDYEKKCRDNHIHHCIDAIVVGCIGKREYDLMAQFYRDEEKYRWEKKKKPFFKKPWETFTQDMLSLKDEVLTVHFNPSNFTKKAHKKVFTPKGIFVAQGDCARVKLHKESYFGAIEQKGEIKYVMRKELSALKIEDIKNIVDAVVKEKVLAVVKKKGFKQAMAEPIYMNEDKRILIKKVRLFVSQTNPLIVKKHRDLSSKEYKQNYYVDNEGNLMIAMYEGVKKNGKIDREITVVNNLEAAKFFRQSQKNNAEKQLISHLSPKNGYPLKTVLTQKQLVLMYEDSPKEIKLRDTKNMVKRLYQVVEIEKDGRVKLKFHQEARSEGLNKNSAAFKIQDTPESLYRHTKSNLKVLVNGVDFKINILGEISLI

SEQ ID NO: 607 - protein, 1375 aa, Prevotella histicola
MKKILGLDLGTTSIGWALVYESENTDEKSSIVRLGVRVNPLSVDEKGNFEKGKAITTNADRQQTHGARINLQRYKLRRENLKDCLQKQGWIGTEALCEEGKTSTFETYMLRAKAAEEEISLHELCRVLFMMNKKRGYKSNRKANNKEDGKLFDGMTVAKKLYEEHLTPAEYSFQLLSSGKKFKQEYYRSDLKEEFDRIWNEQQKYYPEILTDDFKQQLQGKSKGNTSKIFLGKYGIYSADLKGLDRKLQPLKWRVEALKQQVDKEVLAFVISDLNGQIASTSGLLGAISDRSKELYFNKQTVGQYLWTSLKETPHVSIKNKPFYRQDYLDEFEKIWETQATYHKELTPELKQEIRDIIIFYQRPLKSKKGLISVCELEQRKVKVTIDGKEKEISIGPKVAPKSSPMFQEFRIWQNLNNILLIDKGNNSIHPLYEEEKNLLYEELSVKEKLSKAEALKVLNKNSKQWDLNYKEIEGNRTQAVLYDCYNRIIVMTGHEEYNFKKLKASEIRSYVKTTFTGLGFNTDILEFDSSLTGHELEKQPMYQLWHLLYSYESDNSRTGNDALLRKLETAFGFPKEYAAVLSDVVFEDSYGNLSVKAMRKILPHLQAGLNYSQACEEAGYKHSRRSLTKNELDQKEYKEKLELLPKNSLHNPVVEKILNQMINVINAVIDEYGKPDEIRIELARELKIGAAERENMTRSINQGNAENKRIREILEKEFALSYISRNDIIKYKLYEELKSNGFKTLYSDTYISKDKLFSKDFDIEHIIPKARLFDDSLSNKTIEARDVNIAKSNKTAFDFISEKYDQQGIEAYKKKLDILLQDGSISKAKYNRLLMKEADIPSGFIDRDLRDTQYIAKKAYEILSDLVRNVTPTTGAVTSRLREDWQLVDVMKELNFEKYQKLGLVEVIEDRDGRKIKRIKDWTKRNDHRHHAMDALTIAFTKPSYIQYLNNLNARSDKNSSIYGIENKELHREDNKLRFNAPLPINEFRAEARRHLKSILVSVKAKNKVMTQNVNVIKTKHGVIKKVQLTPRGELHNATFYGTKKRPIIKMVKVGAALDEVTIKKVSSSFIREALLDRLHEYNGDAKKAFTGRNSIDKNPIYIDEEHKKTVPALVKTIEWEMYHPTRKLISPDLKIDKVIDKGIREILKTRLAKFNGDAQKAFSNLDENPIYKDEAKKITLKRVSLEGVSSVIPLHTLKDREGKLVVGKDGKPVLGDYVQTSNNHHIAFYMDENGNLQDNVVSFFEAAERKSQGVPVIDKNYNHDKGWNFLFTMKQNEYFVFPNEVTGFNPSEVDLMDEANYSIISPNLYRVQKMSKASGRDYWFRHHLEAMLNDDPKLRNSMFKRITSLKALEGIVKVRINCIGKIVAVGEYD

SEQ ID NO: 608 - protein, 1380 aa, Prevotella intermedia
MKRILGLDLGTTSIGWALVNEAENNNEASSIVRLGVRVNPLTVDEKSNFEKGKAITTNADRQLRHGARINLQRYKLRRQNLHDCLQKQGWLGTEAMYEEGKASTFETYKLRAKAAEEEISLHEFARVLFMLNKKRGYKSNRKANNKEDGQLFDGMTIAKKLYEEHLTPAEYSLQLLNKGKKFTQGYYRSDLNAELERIWDEQKKYYPEILTDEFKQQLEGKTKTNTSKIFLAKYGIYSADLKGLDRKFQPLKWRVEALQQQVDKEVLAFVISDLKGQIANTSGLLGAISDRSKELYFNKQTVGQYLWASLEENPHISIKNKPFYRQDYLDEFEKIWETQAAFHKQLTPELKQEIRDIIIFYQRPLKSKKSLISVCELEQRKVKATIDGKEKEITIGPKVAPKSSPVFQEFRIWQNLNNVLLIDNDTNEKRPLDEVERNLLYKELSIKAKLSKTEALKILNKKGKQWDLNYRELEGNRTQAILFDCYNRIITLTGHEECDFKKIKASEIRHYVSTIFKNLGFSTEILDFDPSLKKHELEKQPMYQLWHLLYSYESDNSRTGNESLLRKLETTFGFPEEYATVLCDVVFEEDYGNLSVKAMREILPYLQAGNDYSQACAYAGYNHSRHSLTKEELDQKVYKERLELLPKNSLRNPVVEKILNQMINVINAIIDEYGKPDEIRIEMARELKSSAADRKKTTHAISQGNAENQRIREILEKEFSLSYISRNDIIKYKLYEELEPNYYKTLYSDTYITKDKLFSKDFDIEHIIPKARLFDDSFSNKTLEARNINLEKSNKTAFDFIKEKYGEDGAEAYKKKLDMLLENDAISRPKYNNLLRAEADIPSDFINRDLRNTQYIAKKACEILGELVKTVTPTTGKITNRLREDWQLVDVMKELNFEKYEKLGLTEIVEDRDGRKIKRIKDWTKRNDHRHHAMDALAIAFTKPSFIQYLNNLNARSNKGDSIYAIENKELHYEEGKLRFNAPIPVNEFRAEAKRHLSAILVSIKAKNKVMTQNVNKIKTKHGIIKKIQLTPRGPLHNETIYGTKMRPIIKMVKVGAALDEATINKVSSPAIREALLKRLNEYSGNAKKAFTGKNTLEKNPIYLNAGRTKTVPSLVKTVEWESFHPTRKLIDKDLNVDKVVDKGIREILKARLEEFNGDAKKAFSNLEENPIYLDEAKKIALKRVSIEGVLSAIPLHTLKNQAGKPITGKDGKPVLGNYVQTSNNHHIAFYYDEDGNLQDNAVSFFEAAERKSQGIPVIDKDYNRDKGWRFLFTMKQNEYFVFPNEATGFIPSEVDLTDEANYGIISPNLYRVQKVSRIDKGTSASRDYWFRHHLETILNDDAKLKNLAFKRIRGLLELKDIIKVRINSTGKIVAVGEYD

SEQ ID NO: 609 - protein, 129 aa, Prevotella multiformis
MQKGGTGCKINRQTVGNVEVNVLNLRLYDRTDDREVTAGYLPTKEDYVRLFVYLNDRKEINQDTLLKDYFRLKKVKCGNEKEFAIRWNYIEDKEKKYPCNETRHELLAALDRAGMEHGWLDDSGTSARW

SEQ ID NO: 610 - protein, 535 aa, Prevotella multiformis
MVKGLLSNIVRTAEEREETSKFVISCTGRITDRLKQDWGLNDVWNSLVYTRFKRLNELTETEAFGHWQDKDRRVFQTSVPLELQRGFSKKRIDHRHHAMDALVIACASRNIIGYLNNESAESPEKREDLRRKLCDKNHIIRKPWESFTQDARAALEDIVVSFKNYVRIINKATNYYERYDADGRKTKAEQKGGEMWAVRKPMHEATYYGKVNLRRKERVSLKAALEDIPSICNRDLRDYINGLVEKHFNKEQVLAQFRSVGNRWNKQHIDKVDVWRFSDGKEEMVATRKPLDTSFDAKRIEAVTDTGIQRILSNYLEAKGGDPKIAFTPEGIADMNQHITAYNNGKQHKPILKVRVSTKLGKKYPVGQTGCKAGQFVVAEAGTNLYFAVYEDGEGNRSYDTIPLNEAVECLKQGLPPVPETREKGDRLKFYLSPNDLVYVPAGDEENEIDRERIYKFVDSSGTTANFIPHRTAGLIYNVDKKLAEALCNGSIIQNEYGVGSQQSKNQKALTGEMVKAVCWKLEVDRLGNILRIIK

SEQ ID NO: 611 - protein, 1380 aa, Prevotella nigrescens
MKRILGLDLGTTSIGWALVNEAESNNEASSIVRLGVRVNPLTVDEKSNFEKGKAITTNADRQLRHGARINLQRYKLRRQNLHDCLQKQGWLGTEAMYEEGKASTFETYKLRAKAAEEEISLHEFARVLFMLNKKRGYKSNRKANNKEDGQLFDGMTIAKKLYEEHLTPAEYSLQLLNKGKKFTQGYYRSDLNAELERIWDEQKKYYPEILTDEFKQQLEGKTKTNTSKIFLAKYGIYSADLKGLDRKLQPLKWRVEALKQQVDKEVLAFVISDLKGQIANTSGLLGAISDRSKELYFNKQTVGQYLWASLEENPHISIKNKPFYRQDYLDEFEKIWETQATFHKQLTPELKQEIRDIIIFYQRPLKSKKSLISVCELEQRKVKATIDGKEKEITIGPKVAPKSSPVFQEFRIWQNLNNVLLIDNDTNEKRPLDEDERYLLYKELSIKAKLSKTEALKILNKKGKQWDLNYKELEGNRTQAILFDCYNRIITLTGHEECDFKKIKASEIRHYVSTIFKNLGFSTEILDFDPSLEKHELEKQPMYQLWHLLYSYESDNSRTGNESLLRKLETTFGFPEEYATVLCDVVFEEDYGNLSVKAMRKILPYLQAGNDYSQACAYAGYNHSRHSLTKEELDQKVYKERLELLPKNSLRNPVVEKILNQMINVINAIIDEYGKPDEIRIEMARELKSSAADRKKTTHAINQGNDENQCIREILEKEFALSYISRNDIIKYKLYEELKPNGFKTLYSDTYIPKDKLFSKDFDIEHIIPKARLFDDSYSNKTLEARDINLAKSNKTAFDFVKEKYGEQGAEAYKKKLDMLLGNNVISKPKYNKLLMTEADIPSDFINRDLRNTQYIARKACEILGELVRTVTPTTGKITNRLREDWQLVDVMKELNFEKYEKLGLTEIVEDRDGRKIKRIKDWTKRNDHRHHAMDALAIAFTKPSYIQYLNNLNARSNKGDSIYAIENKELHYEEGKLRFNAPIPVNVFRAEAKRHLSAILVSIKAKNKVMTQNVNKIKTKHGIIKKIQLTPRGPLHNETIYGTKMRPIIKKVKVGAALDEATINKVSSPAIREVLLKRLNEYSGNAKKAFTGKNTLDKNPIYLNAERTKTVPASVKTVEWENYHPIRKPITPDLKVDKVIDKGIGEILKARLEEFNGDAKKAFSNLEENPIYLDQTKKIALKRVSIEGVLSTIPLHTLKNQAGKPIMGKDGKPVLGNYVQTSNNHHIAFYYDEDGNLQDNAVSFFEAAERKSQGISVIDKDYNRDKGWRFLFTMKQNEYFVFPNEATGFIPSEVDLTDEANYGIISPNLYRVQKMSRIEKGTSVSRDYWFRHHLETILNDDSRLKNSAFKRINSLKPLEGIIKVRINSIGKIVAVGEYD

SEQ ID NO: 612 - protein, 1506 aa, Prevotella nigrescens
MKTILGLDLGPNSIGWAKVEVDDEGNYLRNIKLGSRIIPMTQDMLGDFDKGVKVSQTAIRTDFRGNRRLIERHLLRRERLHRVLHALKFLPKHYEDAIGWDRNEPATYGKFVNNSEPKLAWERQEDGSMRFLFMESFNEMVADFAQNQPSLVSDGKKIPLDWTIYYLRKKALTRPIKKEELAWILLNFNQKRGYYQLRGEEEEDNLTKRKEYYKLKVVGVEADGAPKGGKTWYNIHLENGWTARCQSKIPLDDWVGKVKEYIVTTEYEDDGKTPKCDKEGKVKRSFKSPEKDDWQLIKTRTEKFIDDSNKTVGAFIYDYLLEKPFDKIRGKYIRTIERKYYKNELREILREQTKYHEGLHSLEALKICAEELYKNNQQHQEYLLKKDMTFLLLNDLIFYQRPLKSKKSLIADCPYEVYKYDDKLTGKKGQKKIKCIAKSNPYYQEFRLWQFIANLRLFSVTDGKEVTAEYLKTEEDYVRLFSFLNDRKDIKQETFLRSFLKLKKESIGSEKIYPIRWNYIEDANKSYPCNATRHELLLAFDRADIPRELLDVEEREYRLWHLLYSIEAKEETESALRKLKANKAFGDLNIDDAFVNSFLKIKPFEKEYGAYSEKAIKKLLAVMRRGSLWKEADICEATKQNIAKILQNDIDEKLKKKIEAAVSSFNKLSDFQGLPTWLACYVVYGRHSEAAQIQCWQSPEDLKTYINKFKQHSLRNPIVEQCLLETLRTVYDIWKDAGQIDEIHIELGRNMKSTAEQRARKTKDILRNENTNLRIKNLLVELKNDDKIENVRPYSPSQQEILRIYEEGALQELSKEDEMFEDISKISKMAQPSPTELSRYKLWLEQKYRSPYTGRVIPLSKLFTTAYQIEHIIPQSRYFDDSFNNKVICESEVNSLKDNMLGYEFIKECGGRIVHCTLLGDVKIFTKEEYKDFVTKHYIDNTYKRDKLLLEDIPQEFSARQLNDSRYISKMVQTVLSNIVRAENEQEATSKFVVSCNGAITNRLKKDWGLNDVWSSIVCPRFKRLNEITKTNAFGHWEDKAGKHVFQTTVPLELQRGFSKKRIDHRHHAMDALVIACASRNIVNYLNNESANSPEKREDLRKKLCDEKRKIRKPWKTFTQDAREALSDVVVSFKNYVRVINKATNYYEHYSSSGNKVMISQKGNDMWAIRKPLHKESVFGRVNLCRKVIVSLKKALENIPAICDKTLRDYINALVEKHFNTRQLLAHFKSINYRLNRQCVEKVEVWQFSDEKIEMVARRKSLDTSFDDKQISSITDTGIQKILLNYLQTKDGNAEIAFTPEGIEEMNKNISLYNDGKAHQPILKVRVATPKGMKYPVGQTGNKATKFVVAEKGTNLYFAIYENELGVRSYDTIPLNIVVERLKEGLSPVPQANEADIPLKFYLSPNDLVYVPTKENEDELCRDRIYKFVDSSGTTANFVPHTSANTIYNVDKEYAEKCCNGAVFLNEYGLGSPQSKNQRALTGEMIKEICWKLKVDRLGNIIKVIK

SEQ ID NO: 613 - protein, 774 aa, Prevotella oulorum
MEQCILETLRTVYDIWKEAGQIDEIHVELGREMKQTAEQRAHLTEKVLRNENTNLRIKSLLMELKNDADMKDVRPYSPMQQEILRIYEEGALQTLSKDDAAFTEIMKISKMAQPSASELQRYRLWLEQKYRSPYTGKPISLSKLFTSAYQIEHIIPKKRYFDDSFSNKVICEAEVNGKKDSMLAYEFIKDCGGDVIHCTTLGDVTILSEAEYKALVTELYANNKSKKDKLLMEDIPQDFINRQLNDSRYISRVVMTLLSNIVRIEGEEEATSKFVIPCSGGITDKLKKDWGLNDVWNNIVYPRFERLNALTNTSDFGQWENKEGKRVFQTSVPLELQRGYQKKRIDHRHHAMDALVIACASRKIINYLNNQEANDPTKQENARKQLCIKSRIIRKPWETFTQDAYKALDNIVVSFKNYVRVINKATNYYERYNADGKKAVDEQKGEAMWAIRKPMHKDTVFGHVNLRRKAVVKLKDALENIPAICDKTLRHYIQDLQKKHFNTKQLLAHFKSINYRLNKQAVDKVEVWQYSDDKEQLAATRKPLGPSFDAKCIAAITDTGIQKILLNYLQAKGGDPAIAFTPEGIAEMNQNIAVYNGGKQHQPILKVRIAKPMGKKFPIGQTGNKAFQYVIAEEGTNLYFAIYEDEEGNRTYDTIALREVVERLKQGLTPVPEKNEKGVALKFHLSPNDLVYVPTADELLSKVCSLDKNRIYKMVSATKSECLFIPHSVAKTIYDKVEFEALNKMGRALTGEMIKSVCWKIEVDRLGHIVNIIK

SEQ ID NO: 614 - protein, 691 aa, Prevotella oulorum
MKTILGLDLGTNSIGWAKVIVDDNENYLRDIQLGSRIIPMSQDVLGKFDKGVTESQTAIRTSFRGVRRLRERTLQRRERLHRVLHTLHYLPPHYDSAIGWDRKTPTTYGKFLNHGEPKLAWERREDGTMQFLFMDAFHEMIADFAKYQPALVADGKKVPLDWTIYYLRKKALTQPIKKEELAWILLNFNQKRGYYQLRGEEDEENAAKHEEYHELKVVGVEVDEAGKGDNTWYNVKLENGWTYHRQSKIPLDDWVGKVRAFIVTTEYEKDGTTPKKDKEGNVKRSFRSPDEKDWGLRKKQTEHSLEASGTPVGAFIYDHLLKEPSDKIRGKFIHTIERKYYKQELAAILREQSKHHEKLCSKDMLKACIEELYPNNPLHRESLLKKDMPYLLIEDLIFYQRPLKSKKSLIAECPYEAYSYVDKETGEMKRQGIKCIAKSNPYYQEFRLWQLIANLRLRNRSDERDVTAEYLPHQEDYVRLFTYLNDRKEINQETLLKDFFKLKKVTIGGEKVFPIRWDYIEDKEKKYPCNATRHELLLALDRAGIEHDWLNDRDLAYRLWHLLYSVDSKDETERALRKLKDDDAFVESFLKIKPFEKEYGAYSEKAIKKLLPVMRRGSLWNEADLCPSTKERIANILQGTIDEKLKKKIGAFISSCQQVSDFQGLPEWLACYVVYGRHSEATDIQRWETPE

SEQ ID NO: 615 - protein, 242 aa, Prevotella saccharolytica
MKLVLGLDLGVGSVGWALIFITDSGEPIKILALGERIVSMDSNNSNEFSAGATCTLNQKKTKAKSVRKGYSRYVQRRDALTAELRHIGMMPDETLIKLPVLDLWQLRANAATEGKKLSLAEIGRVLYHINQRRGYKHGKSDVSSDNKQKGYVKAVNERYCMIQERQQTIGQYFALKLKETAVTTEKGTFYTFRIKDQVFPREAYEEEFVVAYSTKVLKFKQITTLLNVVICLMMLLLIVQRY

SEQ ID NO: 616 - protein, 1174 aa, Unknown
  Prevotella sp.
MEFHPELCDAELLKACAEELYRNNEAHRAQLLAKDFKHLLVEDVLFYQRPLKSKKSLIANCPYETRQYINKETGEIKDVNVKCIAKSNPYFQEFRLWQWISNLRLLRQADGQDVTAAYIKGNEDKERLFDLLNNQGEIKQEHILRDFLKLKKPKGGEFPLRWNYVDDKIYPANETRHAINKAIKGMAVDKEEKETLGQLLDQPAVAYMLWNLLYSITDRNELARALRRFALTHGVSSVDAFVESFLKVKPFKKEYGAYSEKATKKLLQVMRLGKYWCGDELPEPAKRTKGNKQAVYDEMAHRGICKQTLQNISNIIEENIDERLMGALLNPERPLTELSHFQGLSVSDACYVVYGRHSEVAEIVKWKDADELNTFINNFKQHSMRNPIVEQCVLETLRTVRDVWEQEGQIDEIHVELGRNMKRTAEQRARDTQAIQRNENTNMRISLLLTELKNDPSISDVRPYSPSQRELLKIYEEGALENLTNQDEDIAKISRLAQPSASELRRYKLWLDQKYVSPYTGRPIPLAKLFTPAYEIEHIIPQSRYFDNSFSNKVICEAEVNKLKDNLLGMEFIKKFGGKTKGILDEEAYKLHVTTNYAHNPAKRSKLLMEDLPTDFNSRQLNDTRYISKTVMALLSNVVREEGERETRSKHVVVCTGGVTDTLKKDWGLHDVWHNLVYPRFIRLNNLTGSQNFGYWRYLNEENSKKGEDSKKVFQITLPPECQRGFVKKRIDHRHHAMDALVIACASANIVNYLNNQSAANPHIHENLQRLLCDRKREIRKPWPTFTQDAQAALKDLVVSFKNTVRVVNKASNTYLRYDKDGKKKRFKQEGEGLKAIRKPMHKETYYGEVNLIRKEMVPLKRALDDVNAIVDKELRASIKGLLRDGFNPQQVLANFKAKDFKFDKRDIKKVEVYVSSEKSTPMVATRKSLDTSFNAKRIADITDTGIQKILLNYLKANDNSPEQAFTPEGIAYLNEHIAEYNDGKPHQPILKVRVSEVKGAKFAVGQTGSKKDKFVEAQSGTNLYFAIYEDKEGKRHFETIALKVAAERLKDKQMPVPEINDAGLPLKFYLSPNDLVYVPTDEDRATAHPSIDKMRIYKMVSATDRQCFFLPFTVASVISNKVEFEALNKMERVLDASEYSSAYDSSHVNKVMVKNVCWKLEVDRLGNITKIVR

SEQ ID NO: 617 - protein, 992 aa, Unknown
  Prevotella sp.
MITRILGLDTGTNSLAWAVVDRDANGNYTLVKRGDVIFTEGVKIEKGIESSKAAERTAHKALRVHYSRRRLHKIDTLKVLVELNLCPCLSDEQLSQWKAKKTYPLTDDFMLWQRSGSAEENNPYYCRHRCLTQKLDLTDQSQRFLLGRAFYHLAQRRGFLSNRLDTSADSDESGKVKSGIAQLSVEMEKAGCEFLGEYFYQLYKQHGNTIKLRSRYTDREEHYKKEFLAICEKQELDPKWVEALQRAIYFQRPLKSQRKGVGKCTFEPKKPRCAESHPDYEAFRMLCFLNNVKIQTPNDTSLRPLNEDEREKIWPIFFRKSKPNFDFEDIAKALAGKNNYAWYKDAGEKPFKFNYRMQQGVSGCPVTAQLIDIFGSDWQTAIAETYTAVEKKNGTKTIDEMADDVWNVLYSFSSKDKLKAFATEKLQLDEASATKFANAKLPHGFASLSLKAIRNILPFLRQGFIYAHAVHLAKIPDIVTKAVWNDADKREMILSGLMEIIENYNPKDRGVEGTIDFCIKSHLQDVIDLRPGAADALYHPSMIETYPDAKLNKMGVFQLGSPRTNAIRNPMAMRSLHILRSVVNQLLRDGIIDRDTEVHVEYARELNDANKRKAIADYQREQEKKRKQYRDDIIALYKSECHKEIEPTDTDILKFQLWEEQNHLCLYTGTQIGICDFLGDNPKFDIEHTVPRSVGGDSTQMNLTLCDATFNRQVKGAQLPSQLSNHADILVRIDHWKSKCEDLRKQLDKIRTYGGMEKNMKDRLIQKRHRLKMDLDYWQGKYSRFTMTEVPEGFSRRQGAGIGLVSKYAGLFLKSLFHNEQNPNKSNVYVVKGVTTAEFRRMWGLQGEYEKKSRLNHCHHCIDAITIACIGKAEYDKMAQYYHDEELFQWRGTTTKPHFNKPWPTFTEDVLAIEQSLLVKHLTKDNMPKQAKKRVRTATGKYLAQGDTARGSLHKDTYYGAIEQNGEIRYVLRKPLNKFENEAELEKIVDQA

SEQ ID NO: 618 - protein, 1375 aa, Unknown
  Prevotella sp.
MKKILGLDLGTTSIGWALVNESENKDEQSSIVRLGVRVIPLTVDEKGNFEKGKAITTNADRQQVHAARINLQRYKLRRENLRDCLQKQGWIGSEPMCEDGKSSTFETYKLRAKAAVEEVSLHEFARVLFMLNKKRGYKSNRKANDKEEGKLFDGMTIAKKLYEEHLTPAEYSLQLLNTGRKFTPEYYRSDLIEEFEKIWNEQQKYYPEILTDEFKQQLEGKAKSNTSKLFLGKYGIYSADTKGLDRRLQPLKWRVEAMKQQVDKDVLAFVISDLKGQIANTSGLLGAISDRSKELYFSKQTIGQYLWASLQENPHISIKNQPFYRQDYLDEFEKIWETQATYHKELTSELKQEIRDIIIFYQRPLKSKKNLIAVCELEQRKVKVTVDGKEKEITIGPKIAPKSSPMFQEFRIWQNLNNILLLDHETNSKRPLYEEERNLLYEELSVKEKLSKTEALKVLGKKSKQWDLNYKELEGNRTQAVLYDCYNRIIVMSGHEECNFKKLKASDIRHYVKMIFKNLAFNTDILCFDSSLKGHELERQPMCQLWHLLYSYEGDNSRTGNDALLRKLETSFGFPKEYAAVLADVIFEDSYGNLSVKAMRNILPHLQAGKDYSQACEEAGYKHSRRSLTKEELNQKVYKEKLELLPKNSLHNPVVEKILNQMVNVINAVIEEYGKPDEIRIELARDLKIGAAERENMTRSINQGNAENKRIREILEKEFALSYLSRNDIIKYKLYEELKSNGFKTLYSDTYISKDKLFSKDFDIEHIIPKARLFDDSLSNKTIEARDVNIAKSNKTAFDFILERYGEQGVKTYKTKLLRLLEDGAISNKKYNNLLKTEADIPSGFIDRDLRNTQYIAKKAYEILSELVKIVTPTTGSVTNRLREDWQLVDVMKELNFEKYQKLGLADVIEDRDGRKVKRIKDWTKRNDHRHHAMDALTIAFTKPSYIQYLNNLNARSDKSSSIYGIEVKELHREEGKFRFNAPLPINEFRAEAKRHLKSVLVSIKAKKKVMTQNVNKIKTKHGIIKKVQLTPRGELHNATYYGTKKRPLVRMVKVGAALDEATIKRVCSPAIRAALLKRLNAYNGDAKEAFTGRNSIDKNPIYLDIEQTKLVPVLVKTIEWGMYHPIRKRITPDLKIDKVIDKGIREKLKARLAEFNGDAQKAFSNLDENPIYMDEAKRITLKRVSIEGVLSAIPLHTLKDKAGKPVIGSDGKPVFGDYVQTSNNHHIAFYIDDKGNLQDNPVSFFEAAERKSQGVPVIDRRYNCDKGWHFVFTMKQNEYFVFPNEATGFIPSEVDLLDEANYCIISPNLYRVQKLSKASGRDYWFRHHLETMLNDDLRLKNSTFKRIQSLKGLEDIVKVRINSIGKIVAVGKYD

SEQ ID NO: 619 - protein, 1483 aa, Unknown
  Prevotella sp.
MKTILGLDLGTNSIGWAKVSVDDYGNYLHDIKLGSRIIPMSQDVLGNFDSGVTVSQTAQRTEFRSKRRLVQRNLQRRERLHRVLHVLDFLPAHYDAAIGWDRTEAVTYGKFLNHAEPKLAWEELGNGKRRFLFMDSFHEMVADFARCQPALVADGKKIPLDWTIYYLRKKALTQAITKEELAWILLNFNQKRGYYQLRGEEEEENPTKQEEYYELKVVSVEATDSRKGNDTWYNVHLENGWIYRRSSKISLDDWVGKVKQFIVTTEYEKDGTTLKTDKEGNVKRSFRAPNENDWGLRKKRTETLLEMSGKTVGAFIYDHLLQEPADKIRGNFIRTIERHYYKAELEAILAEQCKYHIELRDKEMLEACARELYLNNLPHQRSLMKKDMTYLLLYDLIFYQRPLKSKKALIANCPYEYYEYVDKETGEIKRQNIKCIAKSNPYFQEFRLWQFVLNLRLFDRVEDKEVTANYLPTADDHARLFTYLNDRKEINQETLLKDYFKLKKVKIGNEKEYPIRWNYIEDKEKKYPCNETRYELLMALDRAGIEHKWLDDNNLEYRLWHLLYSVEVKSESETALRKLKNDDAFVNSFLKVKPFKKEYGAYSEKAIKRLLAVMRKGFLWNEQDICDETRKRIEIIIKGDVDEKVKERMGHAAYSFDRVSDFQGLPEWLACYVVYGRHSEAMDIQRWDSPERLMAYINNFKQYSLRNPIVEQCILETLRTVHDIWKETGQIDEIHVELGREMKSTSEERARRTQNVLRNENTNLRIKSLLIELKNDTDICNVHPYSPMQQEILRIYEEGALQELNREDEDFEEISKISQMSQPSGKELNRYKLWLEQKYRSPYTGKAISLAKLFTPAYQIEHVIPQSRYFDDSFTNKVICEAEVNTLKSNLLGYEFIKKHGGEIIHCTTLGDVRIFSESEYKAFVMDHYANNKSKKDKLLMEDIPQEFLSRQMNDSRYISKVVKTLLSNIVRMADESEATSKSVIVCTGGVTDRLKKDWGLNDVWNSIVYSRFERLNRLTGTEAFGHWENKDGKRVFQTSMPLELQRGFRKKRIDHRHHAMDALVIACASRNIVNYLNNESANNPKKREDLRRQLCDKNRVIRKPWETFTQDAYNALENVVVSFKNYVRVINKATNRYEHYDENGKKRFVQQKGSELWAIRKPMHKETYYGHVNLRRKELVTLQKALDDIPSICDKKLRDYISALVEKHFNKRQLLAHFKSTDYYWQKQYVNKVYVWTFSDDIKPLVATRKLLDTSFDAKRIGTITDTGIQKILRNYLEAKGGNATLAFTPEGIVEMNQNISKYNDGKPHQPILKVRITEPMGAKYRVGQTENKMAKYVEAQSGTNLYFAIYEDSEGKRSYTTVPLDEVAERLKQRLSPVPEKDENDVPLKFYLSPNDLVYVPTEEELQLRECKLNKDRIYKMVSSTGSECHFIPYYVANVIYNKVEFEAKNKIGRALTGEMIKAVCWKLEIDRLGNILKVIK

SEQ ID NO: 620 - protein, 593 aa, Unknown
  Prevotella sp.
MNTRILGLDTGTNSLAWAVVDRDAKGNYTLVRRGDVIFTEGVNVDGQPVPSKAAVKSKYKSLRVQYARRRLRKIDTLKVLVSLDLCPYLSDQQLSQWKAKKTYPLTDDFMLWQRSGSAEENNPYYCRYRCLTQKLDLTDQSQRFLLGRAFYHLAQRRGFLSNRLDTTSDSAESGKVKSGIAQLSVEMEKAGCTFLGEYFYQLYKQHGNTVRLRSRYTDREEHYIKEFLAICEKQELDAQWVEKLQRALYFQRPLKSQRKGVGKCTFEPKKPRCAESHPDYEAFRMLCILNNIKIKTPKDVSLRPLNAEEREKVWPLFFRKSKPNFDFEDIAKALAGKNNYAWYKDAGEKPFRFNYRMHQGVSGCPVTAQLIDIFGSDWKAGIAETYTAVGKKNGTKTIDEMADDVWNVLYSFSSKDKLKAFATDKLQLDEARATKFANAKLPHGFAALSLKAIRNILPFLRQGFIYAHAVLLAKIPDIVTAAVWDDADKREQILSGLLEVIENYNPDDRGIEGTIDFCIKSHLQDVVDLRPGAADALYHPSMIEAYPDAKLNKMGVFQLGSPRTNAIRNPMAMRSLHILRSVVNLLLRDGMLS

SEQ ID NO: 621 - protein, 1424 aa, Unknown
  Prevotella sp.
MTQKVLGLDLGTNSIGSAVRNLDLSDDLQWQLEFFSSDIFRSSVNKESNGREYSLAAQRSAHRRSRGLNEVRRRRLWATLNLLIKHGFCPMSSESLMRWCTYDKRKGLFREYPIDDKDFNAWILLDFNGDGRPDYSSPYQLRRELVTRQFDFEQPIERYKLGRALYHIAQHRGFKSSKGETLSQQETNSKPSSTDEIPDVAGAMKASEEKLSKGLSTYMKEHNLLTVGAAFAQLEDEGVRVRNNNDYRAIRSQFQHEIETIFKFQQGLSVESELYERLISEKKNVGTIFYKRPLRSQRGNVGKCTLERSKPRCAIGHPLFEKFRAWTLINNIKVRMSVDTLDEQLPMKLRLDLYNECFLAFVRTEFKFEDIRKYLEKRLGIHFSYNDKTINYKDSTSVAGCPITARFRKMLGEEWESFRVEGQKERQAHSKNNISFHRVSYSIEDIWHFCYDAEEPEAVLAFAQETLRLERKKAEELVRIWSAMPQGYAMLSQKAIRNINKILMLGLKYSDAVILAKVPELVDVSDEELLSIAKDYYLVEAQVNYDKRINSIVNGLIAKYKSVSEEYRFADHNYEYLLDESDEKDIIRQIENSLGARRWSLMDANEQTDILQKVRDRYQDFFRSHERKFVESPKLGESFENYLTKKFPMVEREQWKKLYHPSQITIYRPVSVGKDRSVLRLGNPDIGAIKNPTVLRVLNTLRRRVNQLLDDGVISPDETRVVVETARELNDANRKWALDTYNRIRHDENEKIKKILEEFYPKRDGISTDDIDKARYVIDQREVDYFTGSKTYNKDIKKYKFWLEQGGQCMYTGRTINLSNLFDPNAFDIEHTIPESLSFDSSDMNLTLCDAHYNRFIKKNHIPTDMPNYDKAITIDGKEYPAITSQLQRWVERVERLNRNVEYWKGQARRAQNKDRKDQCMREMHLWKMELEYWKKKLERFTVTEVTDGFKNSQLVDTRVITRHAVLYLKSIFPHVDVQRGDVTAKFRKILGIQSVDEKKDRSLHSHHAIDATTLTIIPVSAKRDRMLELFAKIEEINKMLSFSGSEDRTGLIQELEGLKNKLQMEVKVCRIGHNVSEIGTFINDNIIVNHHIKNQALTPVRRRLRKKGYIVGGVDNPRWQTGDALRGEIHKASYYGAITQFAKDDEGKVLMKEGRPQVNPTIKFVIRRELKYKKSAADSGFASWDDLGKAIVDKELFALMKGQFPAETSFKDACEQGIYMIKKGKNGMPDIKLHHIRHVRCEAPQSGLKIKEQTYKSEKEYKRYFYAAVGDLYAMCCYTNGKIREFRIYSLYDVSCHRKSDIEDIPEFITDKKGNRLMLDYKLRTGDMILLYKDNPAELYDLDNVNLSRRLYKINRFESQSNLVLMTHHLSTSKERGRSLGKTVDYQNLPESIRSSVKSLNFLIMGENRDFVIKNGKIIFNHR

SEQ ID NO: 622 - protein, 241 aa, Unknown
  Prevotella sp.
QAVKEKIKEAIAGKNFKTAIAEPIFMNKEKGIRINKVRYYVKAQERLKIRQQRDLSSKEYKQFFCVENESNYLLAIYEGELKGKKERDFCVVNNLDSAACLKRSNKGKAAPLVPERSEERNLPLLAVLKRGTQVLFYENSPEEILFDNPQDLVRRLYKVTGINTKKDVKNGKTYLYGNIELRFHQNAQKKDDVKMQSGVYKNNEVLRQGIVLSHKQFKALVEGVDFEFNVLGEIKKKERHA

SEQ ID NO: 623 - protein, 1216 aa, Prevotella stercorea
MTKILGIDTGTNSLGWAIVDKTADNYNLLDKGVNIFQEGVKIEKGIESSKAAERTEHRATRVRYYRIKLRKIRLLRILSDNHLCPPLSQEELSTWRLKKVYPKNELFMQWQRTDDDTEKTPYAYRHKCIHEKLDLSDVTDRYILGRAFYHIIQRRGFLSNRKEQGGEDSGKVKEGISTLTHEMNEAGYEYLGDYFYALYNKGEKIRKHYTARNEHFLSEFKAICEKQDLEKELGSEVVRNIEKAIFDQRPLKSQKGQVGKCVFEKNKTKCPSSHPMYEEFRMLTFINNIKIKTPNDDVLRPLNTGEREKIMPLFFRKSKKQFDFEDITKKLAPKKMYGFYKKEEDAEMPFLFNYPMDTSVSGCPVTAALKDVFGDDWITAICETYTLGEGKSRFDIVNDIWHALYFYSDKDKLAEFAINRLQLSEDEAKIFSEISLPADYASLSLKAICKILPYLRRGLIYSHAVFLGNLCEVMPKYEWSIKEMRETIIDNIIMEMDKCDTKDKRTFEVCIKDYLKGQYNVSDNSLKKLYHPSMIETYPRVQYTNEHGVYQLGSPRIDSVRNPMAMRSMFRLRKLVNRLLVEGKIDQNTEVHIEFARELNDANKRNAIALFVKENQSANDEARKQIITLFKKETGTDIEPTDKDILKYVLWEEQNHICLYTGKQIRISDFIGANPKFDIEHTIPRSVGGDSTKMNLTLCDSRFNREVKKTKLPVELPNHDEIMERIKEWKKNYELLDIQIRKNKKLSKGATTKEQKDTIIRKRHLLELRRDYWRGKYERFTMESVPEGFSRRQGTDISVISKYARLYLKSLFNRVYTVKGIATSDFRKIWGIQDIYSKKERINHVHHCIDAIVIACIGLDEYNKLGAYYHDEENNKWYGMSKASFKKPWATFVEDIKKIQDEILVYHYTPDNMPKQGRRRIKIDGKKILCKGDAARGSLHNDTYYGAIENDGAVKYVKRIDLASLEEKDVKNIVDDTVRSIIEAAIKEKGFKDAMASTIWMNEEKRVPIKKVRCFTPSITKPLNIRKQRDVSIKEYKQQYHVANDSNYLLALYIGTDNKGKEKREFEIVNILQAAQYYRTSNDKEVVDRHIVPIKSEHDYPFAYTLKIGTMVLLYEKSPNEVWDATIKERNRRLYKVTGLSTMRMKGRNGEYAYATVKLIHNEEARPSKDIKAKNGEYEQGEEFRPAIIMLHTQLNALVQGYDFEINELGEIRRLR

SEQ ID NO: 624 - protein, 1487 aa, Prevotella timonensis; identical to SEQ ID NO: 135

SEQ ID NO: 625 - protein, 770 aa, Pseudoramibacter alactolyticus
MAKGYFASDEEIDFSGVDDGFKNTLSSHQKFKEIFDVEVLNDWQKSMSEKIIFWATVYGDSKKFLKERLEDAYGNELDQKQIKRILGLRFKDWGRLSEAFLNLEGKNSKTNQSQTIIEALWNGDGTNNFNLMELLSSQFTYRDTLKKRALKGEKTLTNITYEDLSDLYLSPSVRRMVWQTILIVKELRQVLGAGPAKIFIEMARDVTLKAGTRTTSRRQQLLDLYKNVQTESRNWVEEIETQEESRFRSKKIFLYYTQMGQCMYTGEPIVFKDLFNRNLYDIDHIYPRHFVKDDSLINNLVLVKKQANSHKSDTFPIENSIQQARRDFWKWLSEKGLISREKFNRLTRRTSFSDEELAGFISRQIVETRQGTKAVAQIFENALPDSEVVYVKAGNVSDFRHHFNLLKCREINDLHHAQDAYLNVVVGNVYHTKFTKNPINFIKGYRKDRKAYAYHMDQIFDHPVKRNDIIAWQTDKNQSIATVKKVMAKGTPLVTRMSYEEHGELSNQNICSAKAAQKAEGKGYLPIKNSERLSNTQRYGGYNKYAGSYFFLVEHTLKKNRVRTIETMPLFLRDTIKTSKDLLKYCCESLKLEAPSIRVMKIKMGSLLSVNGAFVYLTGRSGKKLITPNGFQLILPQKWQDYIRLLIKTKDSPDDVEGISGGKNIEFYDILVEKHTKTCLKNRPNPIGEKLREWRNDFIALDNQKQSDILLEILKLTTFDNSGADLRAIGGKNQSGVSTIGKKISSQKSVVLVHRSVTGIFEKQVDLLSI

SEQ ID NO: 626 - protein, 103 aa, Rhizobium etli
MSGEQLTREIGRSGVKASAVGLGTWAIGGWMWGGTDEAQSIAAIQASLDAGVTLIDTAPAYGLGRSEEIVGKALAGRRDKAVIATKCGLVWHTQKGNHFFDQD

SEQ ID NO: 627 - protein, 1059 aa, Unknown
  Rhodovulum sp.
MGIRFAFDLGTNSIGWAVWRTGPGVFGEDTAASLDGSGVLIFKDGRNPKDGQSLATMRRVPRQSRKRRDRFVLRRRDLLAALRKAGLFPVDVEEGRRLAATDPYHLRAKALDESLTPHEMGRVIFHLNQRRGFRSNRKADRQDREKGKIAEGSKRLAETLAATNCRTLGEFLWSRHRGTPRTRSPTRIRMEGEGAKALYAFYPTREMVRAEFERLWTAQSRFAPDLLTPERHEEIAGILFRQRDLAPPKIGCCTFEPSERRLPRALPSVEARGIYERLAHLRITTGPVSDRGLTRPERDVLASALLAGKSLTFKAVRKTLKILPHALVNFEEAGEKGLDGALTAKLLSKPDHYGAAWHGLSFAEKDTFVGKLLDEADEERLIRRLVTENRLSEDAARRCASIPLADGYGRLGRTANTEILAALVEETDETGTVVTYAEAVRRAGERTGRNWHHSDERDGVILDRLPYYGEILQRHVVPGSGEPEEKNEAARWGRLANPTVHIGLNQLRKVVNRLIAAHGRPDQIVVELARELKLNREQKERLDRENRKNREENERRTAILAEHGQRDTAENKIRLRLFEEQARANAGIALCPYTGRAIGIAELFTSEVEIDHILPVSLTLDDSLANRVLCRREANREKRRQTPFQAFGATPAWNDIVARAAKLPPNKRWRFDPAALERFEREGGFLGRQLNETKYLSRLAKIYLGKICDPDRVYVTPGTLTGLLRARWGLNSILSDSNFKNRSDHRHHAVDAVVIGVLTRGMIQRIAHDAARAEDQDLDRVFRDVPVPFEDFRDHVRERVSTITVAVKPEHGKGGALHEDTSYGLVPDTDPNAALGNLVVRKPIRSLTAGEVDRVRDRALRARLGALAAPFRDESGRVRDAKGLAQALEAFGAENGIRRVRILKPDASVVTIADRRTGVPYRAVAPGENHHVDIVQMRDGSWRGFAASVFEVNRPGWRPEWEVKKLGGKLVMRLHKGDMVELSDKDGQRRVKVVQQIEISANRVRLSPHNDGGKLQDRHADADDPFRWDLATIPLLKDRGCVAVRVDPIGVVTLRRSNV

SEQ ID NO: 628 - protein, 1405 aa, Riemerella anatipestifer
MKTILGLDLGTNSIGWALVKEAENSNEKSEIIKLGVRVNPLTVDEKTNFEAGRPLSTNADRTAKRSARRNLQRYKLRRKNLIDLLIKNQLIDKDTPLTEIGKNTTHQTLELRAKAARERIELEDLARVFLAINKKRGYRSSRKVNNEEEGQAVDGMAVAKKLYDENLTPGQYAYELLSKGKKYVPDFYRSDLQAEFNAIWEYQKQFYADILDDELYNALKGQGQQNSRKRFLAIKGVYTAENKGKRDDVKLRHYKWRSEAISKKINIEEVAYVLVEINNDLNKSSGYLGAISDRSKELYFNKETVGENLWKQIQKNPHTSLKNQVFYRQDYLDEFEQIWETQAQFHPQLTLALKEQIRDVIIFYQRKLKSQKGLLSFCQFESWEIERKDENGNVILNKTTQLPKRQTVGRRVAPKSSPLFQEFKIWQNINNLEVTKISEGASKNKKETETLSDDERKLLFEELNLRGNLSQKEVLQILGLKDKEYKTNFSEGLEGNRTNAALFNIYQQIAENEGYGFDWSKKSAQEIKEELKAVFPQIGIQADILDFNANLDGKEFENQASYQLWHLLYSAEEDDKINEEDQIIYGNSAVSLKKKLCEKFGFTPEYAKWIANVSLQDDYGNLSTKAMRKIIPYLIDGNDYSEACALAGYNHSNSLTKEENDNRELLDKLELLPKNSLRNPVVEKILNQMVNVVNQVIETYGKPDEVRIELARELKKSAEKRAEMTKSINEATRRNEDIKKLITKDFGIPNPTKSDVVRYRLWEELAPLAYKDVFTGKQIKKEDLFSSKIDIEHIIPKALLFDDSFSNKTLVFRETNLKKADRTAYDFIESDYNATLDDYIQRVETLYNNTKGTISKGKRNKLLMAQKNLPDGFIERDLRNSQYIAKKAKAMLYQVFKDVNVTSGSITDRLREDWDLINVMKELNFPKYKALGLTEIEERYDIGQEKTKRVEVITDWTKRNDHRHHAMNALTVAFTTSSHIQYLNYLNARKNESHKEHKNIKGIENKITHKQKDKRKFIPPMPNFREEAKKHIETILVSIKNKNKVYTKNINKTKKKSGHNTKEQLTPRGQLHKETVYGKSKRPMSKPTKINKNFSLEQAQLIINVQEKELVLRHLAQFDNNPAVAFDTKTLKKMPLLKNGEPLKEVLCFEEIFTIRKDITPDLKIEKVVDEKIKAILEQRKKDFGGNAKEAFSDLDKNPIWLNKKKGICIKRVTITGVSNAEALHHQKDHLGREILDDNGNPIPADFVSTGNNHHLAVYLDSEGKLQDNIVSFYEAVVRTSQGLPVVDKGLNKDLGWKFLFSLKQNEMFVFPNDDFDINDFDLLDDKKAELISKHLYRVQKISKVSAGNSFVRDIVFRHHLETTVKEVKELKDISYIQLKSLEGLRNIKKVRINHIGKIVQVGEY

SEQ ID NO: 629 - protein, 1145 aa, Riemerella anatipestifer
MKTILGLDLGTNSIGWALVKETENSNEKSEIIKLGVRVNPLTVDEKTNFEAGRPLSTNADRTAKRSARRNLQRYKLRRKNLIDLLIKHRLIDKDTPLTEIGKNTTHQTLELRAKAARERIELEDLARVFLAINKKRGYRSSRKVNNEEEGQVVDGMAVAKKLYDENLTPGQYAYELLSKGKKYVPDFYRSDLQAEFDSIWEYQKQFYADILDDELYNALKGQGQQNSRKRFLAIKGVYTAENKGKRDEVKLQHYKWRSEAITQKLSIEEVAYVLVEINNDLNKSSGYLGAISDRSKELYFNKETVGENLWKQIQKNPHTSLKNQVFYRQDYLDEFEQIWETQAQFHPQLTLALKEQIRDVVIFYQRKLKSQKGLLSFCQFESWEIERKDENGNVILNKTTQLPKRQTVGRRVAPKSSPLFQEFKIWQNINNLEIAKISDGNSKNKKETEALSDDERKLLFEELNLRGNLSQKEVLQILGLKDKEYKTNFPEGLEGNRTNAALFNIYQQIAENEGYGDWTKKSAQEIKEELKAVFPQIGIQADILDFNAELDGKEFENQASYQLWHLLYSAEEDDKINEEDQIIYGNSAVSLKKKLCEKFGFTPEYAKWIANVSLQDDYGNLSTKAMRKIIPYLIDGNDYSEACALAGYNHSNSLTKEENDNRERLNKLELLPKNSLRNPVVEKILNQMVNVVNQVIETYGKPDEVRIELARELKKSAEERAEMTKGINEATRRNEDIKKLITKNFGIPNPTKNDVVRYRLWEELAPLAYKDVFTGRQIKKEDLFSSKIDIEHIIPKALLFDDSFSNKTLAFRETNLKKADRTAYGFIESDYNATLDDYIQRVETLYNNAKGTISKGKRNKLLMAQKNLPDGFIERDLRNSQYIAKKAKSMIEKVFNDVNVTSGSITDRLREDWDLINVMKELNFPKYKALGLTEIEERYDIGQEKTKKVEVITDWTKRNDHRHHAMDALTVAFTTKSHVQYLNNLNTIHSLKGDEVDLELSKLYGLKNTITEVVNKKRKFIPPMPNFREEAKKHIETILVSIKNKNKVYTKNINKTKKESGYHTKEQLTPRGQLHKETVYGKSKRPMNKPTKINKNFSLEQAQLIINVQEKELVLRHLAQFDNNPAVAFDTKTLKKCHYLKMVNL

SEQ ID NO: 630 - protein, 1400 aa, Riemerella anatipestifer
MKTILGLDLGTNSIGWALVKETENSNEKSEIIKLGVRVNPLTVDEKTNFEAGRPLSTNADRTAKRSARRNLQRYKLRRKNLIDLLIKHRLIDKDTPLTEIGKNTTHQTLELRAKAARERIELEDLARVFLAINKKRGYRSSRKVNNEEEGQVVDGMAVAKKLYDENLTPGQYAYELLSKGKKYVPDFYRSDLQAEFDSIWEYQKQFYADILDDELYNALKGQGQQNSRKRFLAIKGVYTAENKGKRDEVKLQHYKWRSEAITQKLSIEEVAYVLVEINNDLNKSSGYLGAISDRSKELYFNKETVGENLWKQIQKNPHTSLKNQVFYRQDYLDEFEQIWETQAQFHPQLTLALKEQIRDVVIFYQRKLKSQKGLLSFCQFESWEIERKDENGNVILNKTTQLPKRQTVGRRVAPKSSPLFQEFKIWQNINNLEIAKISDGNSKNKKETEALSDDERKLLFEELNLRGNLSQKEVLQILGLKDKEYKTNFPEGLEGNRTNAALFNIYQQIAENEGYGDWTKKSAQEIKEELKAVFPQIGIQADILDFNAELDGKEFENQASYQLWHLLYSAEEDDKINEEDQIIYGNSAVSLKKKLCEKFGFTPEYAKWIANVSLQDDYGNLSTKAMRKIIPYLIDGNDYSEACALAGYNHSNSLTKEENDNRERLNKLELLPKNSLRNPVVEKILNQMVNVVNQVIETYGKPDEVRIELARELKKSAEERAEMTKGINEATRRNEDIKKLITKNFGIPNPTKNDVVRYRLWEELAPLAYKDVFTGRQIKKEDLFSSKIDIEHIIPKALLFDDSFSNKTLAFRETNLKKADRTAYGFIESDYNATLDDYIQRVETLYNNAKGTISKGKRNKLLMAQKNLPDGFIERDLRNSQYIAKKAKSMIEKVFNDVNVTSGSITDRLREDWDLINVMKELNFPKYKALGLTEIEERYDIGQEKTKKVEVITDWTKRNDHRHHAMDALTVAFTTKSHVQYLNNLNTIHSLKGDEVDLELSKLYGLKNTITEVVNKKRKFIPPMPNFREEAKKHIETILVSIKNKNKVYTKNINKTKKESGYHTKEQLTPRGQLHKETVYGKSKRPMNKPTKINKNFSLEQAQLIINVQEKELVLRHLAQFDNNPAVAFDTKTLKKMPLLKNGEPLKEVLCFEEIFTIRKDITPDLKIEKVVDEKIKAILEQRKKDFGGNAKEAFSDLDKNPIWLNKEKGICIKRVTITGVSNAEALHHQKDHLGREILDDNGNPIPADFVSTGNNHHVAIYEDEKGKLQEKVVSLYEAVARANQGLPVVDKGLNEDLGWKFLFTMKQNEMFVFPNDDFDVNDIDLLDENNAKIISQHLFRVQKLATKNYMFRHHLETNVQEVKELNDIAYKSIRSTEPLKNIKKVRINHIGKIVQVGEY

SEQ ID NO: 631 - protein, 1128 aa, Roseburia intestinalis
MDEKMDYRIGLDIGIASVGWAVLQNNSDDEPVRIVDLGVRIFDTAEIPKTGESLAGPRRAARTTRRRLRRRKHRLDRIKWLFENQGLINIDDFLKRYNMAGLPDVYQLRYEALDRKLTDEELAQVLLHIAKHRGFRSTRKAETAAKENGAVLKATDENQKRMQEKGYRTVGEMIYLDEAFRIGCSWSEKGYILTPRNKAENYQHTMLRAMLVEEVKEIFSSQRRLGNKKATEELEEKYLEIMTSQRSFDLGPGMQPDGKPSPYAMEGFSDRVGKCTFLGDQGELRGAKGTYTAEYFVALQKINHTKLVNQDGETRNFTEEERRALTLLLFTQKEVKYAAVRKKLGLPEDILFYNLNYKKAATKEEQQKENQNTEKAKFIGMPYYHDYKKCLEERVKYLTENEVRDLFDEIGMILTCYKNDDSRTERLAKLGLVPIEMEGLLAYTPTKFQHLSMKAMRNIIPFLEKGMTYDKACEEAGYDFKADSKGTKQKLLTGENVNQTINEITNPVVKRSVSQTVKVINAIIRTYGSPQAINIELAREMSKTFEERRKIKGDMEKRQKNNEDVKKQIQELGKLSPTGQDILKYRLWQEQQGICMYSGKTIPLEELFKPGYDIDHILPYSITFDDSFRNKVLVTSQENRQKGNRTPYEYMGNDEQRWNEFETRVKTTIRDYKKQQKLLKKHFSEEERSEFKERNLTDTKYITTVIYNMIRQNLEMAPLNRPEKKKQVRAVNGAITAYLRKRWGLPQKNRETDTHHAMDAVVIACCTDGMIQKISRYTKVRERCYSKGTEFVDAETGEIFRPEDYSRAEWDEIFGVHIPKPWETFRAELDVRMGDDPKGFLDTHSDVALELDYPEYIYENLRPIFVSRMPNHKVTGAAHADTIRSPRHFKDEGIVLTKTALTDLKLDKDGEIDGYYNPQSDLLLYEALKKQLLLYGNDAKKAFAQDFHKPKADGTEGPVVRKVKIQKKQTMGVFVDSGNGIAENGGMVRIDVFRVNGKYYFVPVYTADVVKKVLPNRASTANKPYSEWRTMEDKDFLFSLYSRDLVHIKSKKGIPIKNVDGSLGESKEVYAYYIGADISGAKIEGKAHDSRYTFRGIGVQKLELIEKCQVDILGHISTVKNEKRMGFS

SEQ ID NO: 632 - protein, 1471 aa, Scardovia wiggsiae
MGYKAPRNDKGEIDYGVGLDLGNGSVGWVAMDKDYHLIRARGHELIGARLFDPANSAENRRESRTTRRRLSRRRWRLRMLDSLFASELAKIDPNFLARRKYSWVHPKDEQNHENWYGSIIFGSKEQDKQFYKDYPTIYHLRKKLTEDTERHDIREIYVAIHHIVKYRGHFLREGEINSENLFDPEGFVELIKDVIKLNNSYDESTPIFEASPADVSEALLNEHTSRSGRIEDTLDKLDFSVSRVDKHELKGMRDAAKAVIGAIVGNTADFSKIFNLDNLDKDSKDNLKLKFADSNFDEKYGGVVGSGLLDETQIELVDRIHAVYDAVALKGILGDAHTISEAKVESYEKHRKNWKLIKEELRTKENKDEVDLWYGDLSGRQYKNPPDPEKGPDEGSKKDSPIRDSDQKQNLIKKANDYFTELIDDSQLSEEQKNCLKNDINNGQLFPVQRSSDNGVIPYQIHLNELRRIIENQKQYYPFLAETFIRKTAEGKSYEENKIVALLKFRVPYYVGPLVSKEDMEEHSSGNSAYHWMARNPGRGEAITPWNFDEVVDKDESGARFISRLTGTDTYLLGEPTLPQHSLLYEEYMVLSELNNVRLNVRQGNHWSDKNRQRLSYKQKEFLIENLFKEHKTVTRKRAEDCLSSMGCGEVQLFGLSDEKKFASSLSSYITLKKILGKAFVDDSGNSAILERIIEVQTVFEDREPLTHQLSLIDSLTVEQRKQLAKIHYTGWGKLSRKLLTSKKGSYKIHSQNEIMRTQHSIIDIMRGDSLNLIEIIRDKKIGIGEWIDNENLDRETGESDVSRLESVFEGIVMSPRVKRGVVQAVRVIDDLAKAIGNPPQRIFIEMADEVQASQRTVSRLSRLKALYGSPSLQKEFNDLKDLRKSLNETKDADLQEDRLYLYYIQLGKDLYTGKEISIDSLSSAYDIDHIVPQALTQDDSIDNRVLVSRKENARKTDSYLYTPDLIKNMRPLWGKLLAAGLMSQKKYDALTRVDDFKDREKQRFVQRSLVETRQIMKNVSTILRTYYGEDTNVVTLKSSITHDMRKYLGFPYKNRDINDYHHAQDALCISAAGQFMLNRHFVSGGEVTDGASNAYNMYLAEYLQEFRDAKARGERKRSTAFGFVVGSMSSKDDEKRTDHRTGEIVWSETNAEYLRKVMNYKKMLITQKVGDVKTRALYDETRYGHKESSAKSIKFDNLRRDTSLYGGFSGASTAYMMLVEYKKKNKLVSITAQEASLLAVADQKNDTVSVMDGILASHGLSGAKILLPKIVTGQLLDYSDALVTLQSASELNTARQMWLPRNDYNDIDIILKSKDIEDAAHKLGYDSDTVHVLRRIQKLFEAVFRVAESQFPLHQLSKDQQEEILRDPQNYGFGSAVKLLGGLLKALHANAENTNLAGLVKVLHGDKEYSDDGKAKEFKKFGFSPRWRRISNPTGFTLSDSDTFIYQSPSGIFEQRVTVKELKEKADKQK

SEQ ID NO: 633 - protein, 116 aa, Sphingobacterium spiritivorum
MFRKYFEEKNSARLLFTLKQGDFVYVPDDNEEVILDESSPLFIDYWKNISERSNNIHVVQKFSGKEIYFLKHTIADTIAKKIEFGSQDCYQSLNGKSIKEFCIKIDSDRLGNISKV

SEQ ID NO: 634 - protein, 1306 aa, Sphingobacterium spiritivorum; identical to SEQ ID NO: 98

SEQ ID NO: 635 - protein, 1110 aa, Unknown
  Sphingobium sp.
MAEGKKRIWRLGADLGANSLGWAAIELSAPVNGKPIAILAAGSRIFSDGRDPKSGASLAVDRRDARAMRRRRDRFKQRQKALIKYLIADGLFPADEAARNAMAAIDPYAVRARALDEALSLPELGRALFHLNQRRGFKSNRKADRKADDDAGKIAIGIDRTRDAIAEDEADAGAEPGSWTFGKWLHERRLKGQSVRTRLRPESGEDAKGDGYDFYPDRALMEEEFDAIWAAQAPHHPDVLTNDVHDRLHEIIFYQRPLKAPQVGMCSLIPGDRRLPKAHPLFQRRRLLEELNALMIVRPGEVAQRLTREERDILLLKLKDKNKVSFATLRKALKLDPDARFNKESEDRTDLKGDEVAAVMGSKTRFGNLWVHLSIEAQWDVLARLDAVESDAEDAAFCAWLVETYALTPEQARAVANAPLPPGYGRFGETATRKLIEALRDGKKDDRVLVYSEAVTEAGLGHHSDRRTGEVFEDAKGRPQLPYYGVALERHIMPGTGDPSDPEEMRVGRLTNPTVHIGLNQLRRILNVLIRAYGPPAEIAIELARELKLTDEDKKRINRENNDNRIAAERRSEKLLAIGQADSGANRALLKLWEELNPANVLDRRCIYSGRQISIDMLFSAAVEVDHILPFAATLDDSNGNKIVCLREANREKRKRSPHDAWGHSARWDEIAARAAQLPRNKRWRFEPDAMDKFRDEGGFQARHLVDTQYLARLSREYLATLYPEKGEGSGHIWVSPGRLTEMVRRKLGLNDLLPDHNFGGGADQAKNRLDHRHHAIDAVVVAIVDRGMLNAIARASGQEGAEGRERIIIPEPWDGFRDALRETVNRITVSHRTDHGTASKAGLPKGKDATAGRLHNDTAYGFTGDTDAKGNSIVVRRVPLSSFKKLADLDRIRDADLKAALYQHLNGLEGKAFEKALAEFHKLEWHNFGGVRRVRVTEPLTVIPIKDRNGRIYKGYKGDSNYRYDVWELPDGKWVTNWKNEAGEAMSSVISMFDAHQSSEPPRPHPAARKILSLHQNDLLAIEREGEDRKLMRVVKFGQSGQITLAEHQQAGDLKKRDAVSNDDDPFKYFAPTSGGLKKVKARQVRIDEIGRVLDPGFPARTARRKTRG

SEQ ID NO: 636 - protein, 1084 aa, Sporolactobacillus vineae
MKYSIGLDIGISSVGWSVINLDRERIELMGARLFDAAENPKNGSSLAAPRRDARSARRRLRRRRYRVGRVRHFIIDRGLVTRGQADQLFDWKDGDLDIWLVRVNALERLLTDREFARVLIHIAKNRGYRSNRKSEAKSGENGQVLSAIKANKELMEEKGYQTVAEMLVNEPETFAGRKRNRGGEYTHVIARSELEHEIRLIFTKQRAFGNRFATEENENTYVKIWAAQRPVATKDDILKKIGDCTFEKGEKRAPKASYAFQYFRALDKLNRLRILSVREPSRNLTDDERNLIVPALFNHDKQKYSDLRKILQLRDDQKFNELFYDPGKSLKENENKTFLSLAEQYKIRKVIRDVQGKDGLLQYRPLDIDTIAYALTVFKDDQDTRDYLSNTFVNGNGKQVLNLANRAFDAELIDGLLSLSFAKFGHLSLKALHKLIPHMEQGLSYYDACKKVGYHDNEQVGKSKQHLLPVIPADEIRNPVVVRSLSQTRKVINAIIKRYGSPTFMYIELAREMGRPYNERRDLEKQYNKNRTVNDSAIEQIHELYPEIGAPRGHDILKYKLWQQQDCKCAYSLEKIPAEKIFEPGYAEVDHIIPYSRSFDDSNSNKVLVLSRMNQEKKNRTPYEWFGGDEHRWNKFESYVNALKVNRKKKSLLTKKNMDTEEEDTFKSRHLNDTRYITRFIKSFVEDNLLFREIEGAKQHVFTVNGAYTSLMRKRWGFNKNREESDLHHSVDAVIIAVSQPFRNEVSRYFKHREISLPQLLKRTWDYFPEPWEGFVKELRARTLQDPEKLKLALESLDLDSYDPEFIDEVKPIFISRMPKRSIKGQIHDETLRRNRGKTKDGFVKIVTRTRLENIKFDKNGDFPMYGRESDPKTYQAIKQRYLENNKDKKKAFIEPLYKPAKNPNNASLIRSVKIEDKANQIVPLRDEAVAYNASIVRTEVYRNKETGKFYLAPVYVSDVFAGREPRRFIRANVPYEQWVNITDKFTFLFNLYPNDVIYIKMKKVKTTKSNINKTISWQESYFYFKGTDIHTGAITIIDHMNSFTDRVGTQGLQLFEKYQVDPLGNLSRVHGETQYGVPALSHS

SEQ ID NO: 637 - protein, 475 aa, Staphylococcus massiliensis
MGQDYILGLDIGITSVGYGLIDYHDKSVIDAGVRLFKEANVENNEGRRSKRGSRRLQRRRKHRLARTRNLLESYQLNPFPKCEKNPYEIRVKGFKEVLTSDELSAALLHLAKRRGIDNVHVTDTESDSSDNGLSTKEQLAKNQKALESRYVCELQLERLLNDNKVRGANNRFKTQDFVREAKQILSIQKDHHNLDQVFIDKYISLLETRREYYEGPGKGSPYGWDGDIKKWYELLMGRCTYFPESLRSVKYAYSADLFNALNDLNNLVIVRDENDKLTYPEKYHIVENVFKQRKKPTLKQIAKEIDVAPEDIRGYRVTASGTPVFTSFKLYHDIKSVTSNDKVLEDTELLDAIAEVLTIYQSPIEVQEKLESLNVILTKEEIEGISKLTGYTGTHALSLKAIQIVIDELWETNDNQMTIFTRLNMKPQKVDLAKANKIPTSLVEDFIISPVAKRAFIQSIKVINAVIKNMVCLKI

SEQ ID NO: 638 - protein, 581 aa, Staphylococcus massiliensis
MPKDIIIELAREKNSDEERKIIRDVQKRNQQTRDLVDKVIKETGKTKAKGMVEKLILHDKQEGKCLYSLKSIPLEDLLNNPHHYEVDHIIPRSVSYDNSMNNKVLVLQEENSKKSNQTPFQYFNSSNTHITFKQFKQHVLNLSKTKDRITKKKKEYLLEERDINKFSVQKEFINRNLVDTRYATRELMTLLRAYFSANELDVKVKAINGGFTSYLRKRWDFKKDRNAGYKHHAEDALIIANVDFIFKQLKALDNAKKVMEGRKVQVEKDNVEDNEHYESLFREPDQIKEIKLYDNYKFSHRVDKKPNRELINDTIYSTRKVDNKTYTIQTVNNIYDKQNDQLKKLFNKSPEKFLMYKHDPKTFDKLATIMRQYKNEKNPLYKFHDETGEYLTKYAKKDNGPIVKSLKYIGKQVNAHLDITNDYENSNNKVVKLSLKPFRFDVYLDDGKYKFVTVKYLDIIKKDTYYVIDEEKYKLALQQKKISENAKFIGSFYNNDLIKINGELLRVIGVNDDAKNTLELNMIDISYRDYVENMNLATTPRIRKNIGKSITILEKYTTDILGNTFKISSPEKPQFIFKVRD

SEQ ID NO: 639 - protein, 1334 aa, Staphylococcus pseudintermedius; identical to SEQ ID NO: 205

SEQ ID NO: 640 - protein, 1112 aa, Staphylococcus simulans; identical to SEQ ID NO: 252

SEQ ID NO: 641 - protein, 773 aa, Streptococcus agalactiae
MNKPYSIGLDIGTNSVGWSIITDDYKVPAKKMRVLGNTDKEYIKKNLIGALLFDGGNTAADRRLKRTARRRYTRRRNRILYLQEIFAEEMSKVDDSFFHRLEDSFLVEEDKRGSKYPIFATLQEEKDYHEKFSTIYHLRKELADKKEKADLRLIYIALAHIIKFRGHFLIEDDSFDVRNTDISKQYQDFLEIFNTTFENNDLLSQNVDVEAILTDKISKSAKKDRILAQYPNQKSTGIFAEFLKLIVGNQADFKKYFNLEDKTPLQFAKDSYDEDLENLLGQIGDEFADLFSAAKKLYDSVLLSGILTVIDLSTKAPLSASMIQRYDEHREDLKQLKQFVKASLPEKYQEIFADSSKDGYAGYIEGKTNQEAFYKYLSKLLTKQEDSENFLEKIKNEDFLRKQRTFDNGSIPHQVHLTELKAIIRRQSEYYPFLKENQDRIEKILTFRIPYYIGPLAREKSDFAWMTRKTDDSIRPWNFEDLVDKEKSAEAFIHRMTNNDFYLPEEKVLPKHSLIYEKFTVYNELTKVRYKNEQGETYFFDSNIKQEIFDGVFKEHRKVSKKKLLDFLAKEYEEFRIVDVIGLDKENKAFNASLGTYHDLEKILDKDFLDNPDNESILEDIVQTLTLFEDREMIKKRLENYKDLFTESQLKKLYRRHYTGWGRLSAKLINGIRDKESQKTILDYLIDDGRSNRNFMQLINDDGLSFKSIISKAQAGSHSDNLKEVVGELAGSPAIKKGILQSLKIVDELVKVMGYEPEQIVVEMARENQTTNQ

SEQ ID NO: 642 - protein, 1370 aa, Streptococcus agalactiae
MNKPYSIGLDIGTNSVGWSIITDDYKVPAKKMRVLGNTDKEYIKKNLIGALLFDGGNTAADRRLKRTARRRYTRRRNRILYLQEIFAEEMSKVDDSFFHRLEDSFLVEEDKRGSKYPIFATMQEEKDYHEKFPTIYHLRKELADKKEKADLRLVYLALAHIIKFRGHFLIEDDRFDVRNTDIQKQYQAFLEIFDTSFENNHLLSQNVDVEAILTDKISKSAKKDRILAQYPNQKSTGIFAEFLKLIVGNQADFKKHFNLEDKTPLQFAKDSYDEDLENLLGQIGDEFADLFSAAKKLYDSVLLSGILTVTDLSTKAPLSASMIQRYDEHREDLKQLKQFVKASLPEKYQEIFADSSKDGYAGYIEGKTNQEAFYKYLSKLLTKQEDSEYFLEKIKNEDFLRKQRTFDNGSIPHQVHLTELKAIIRRQSEYYPFLKENQDKIEKILTFRIPYYVGPLARGNSDFAWMTRKTDDSIRPWNFEDLVDKEKSAEAFIHRMTNNDLYLPEEKVLPKHSLIYEKFTVYNELTKVRYKNEQGETYFFDSNVKQEIFDGVFKEHRKVSKKQLLDFLAKEFEEFRIVDVTGLDKENKAFNASLGTYHDLKKILDKDFLDNPDNESILEDIVQTITLFEDREMIKKRLENYKDLFTESQLKKLYRRHYTGWGRLSAKLINGIRDRESQKTILDYLISDGRANRNFMQLINDDGLSFKSIISKAQSGSHSDNLKEVVGELAGSPAIKKGILQSLKIVDELVKVMGYEPEQIVVEMARENQTTNQGRRNSRQRYKLLEDGVKNLASDLNGDILKEYPTDNQALQNERLFLYYLQNGRDMYTGEALDIDNLSQYDIDHIVPQAFIKDDSIDNRVLVSSAKNRGKSDDVPSIDIVKARKAFWKKLLDAKLISQRKYDNLTKAERGGLTPDDKAGFIQRQLVETRQITKHVARILDERFNNKVDDNNKPIRKVKIVTLKSNLVSNFRKEFGFYKIREVNNYHHAHDAYLNAVVAKAILTKYPQLEPEFVYGDYPKYNSYKTRKSATEKLFFYSNIMNFFKTKVTLADETVVVKDDIEVNNETGEIAWDKKKHFATVRKVLSYPQVNIVKKTEVQTGGFSKESILAHSNSDKLIPRKTKDIYLDPKKYGGFDSPIVAYSVLVLADIKKGKAQKLKTVKELIGITIMERERFEKNPSAFLESKGYLNIRTDKLIILPKYSLFELENGRRRLLASAGELQKGNELALPTQYMKFLYLASRYNESKGKPEEIEKKQEFVNQHVSYFDDILQLINDFSKRVILADANLEKINKLYSDNKDNTPVDELAKNIINLFTFTSLGAPAAFKFFDKSVDRKRYTSTKEVLDSTLIHQSITGLYETRIDLGKLGED

SEQ ID NO: 643 - protein, 1370 aa, Streptococcus agalactiae
MNKPYSIGLDIGTNSVGWSIITDDYKVPAKKMRVLGNTDKEYIKKNLIGALLFDGGNTAADRRLKRTARRRYTRRRNRILYLQEIFAEEMSKVDDSFFHRLEDSFLVEEDKRGSKYPIFATMQEEKDYHEKFPTIYHLRKELADKKEKADLRLVYLALAHIIKFRGHFLIEDDRFDVRNTDIQKQYQAFLEIFDTSFENNHLLSQNVDVEAILTDKISKSAKKDRILAQYPNQKSTGIFAEFLKLIVGNQADFKKHFNLEDKTPLQFAKDSYDEDLENLLGQIGDEFADLFSAAKKLYDSVLLSGILTVTDLSTKAPLSAYMIQRYDEHREDLKQLKQFVKASLPEKYQEIFADSSKDGYAGYIEGKTNQEAFYKYLSKLLTKQEDSEYFLEKIKNEDFLRKQRTFDNGSIPHQVHLTELKAIIRRQSEYYPFLKENQDKIEKILTFRIPYYVGPLARGNSDFAWMTRKTDDSIRPWNFEDLVDKEKSAEAFIHRMTNNDLYLPEEKVLPKHSLIYEKFTVYNELTKVRYKNEQGETYFFDSNVKQEIFDGVFKEHRKVSKKQLLDFLAKEFEEFRIVDVTGLDKENKAFNASLGTYHDLKKILDKDFLDNPDNESILEDIVQTITLFEDREMIKKRLENYKDLFTESQLKKLYRRHYTGWGRLSAKLINGIRDRESQKTILDYLISDGRANRNFMQLINDDGLSFKSIISKAQSGSHSDNLKEVVGELAGSPAIKKGILQSLKIVDELVKVMGYEPEQIVVEMARENQTTNQGRRNSRQRYKLLEDGVKNLASDLNGDILKEYPTDNQALQNERLFLYYLQNGRDMYTGEALDIDNLSQYDIDHIVPQAFIKDDSIDNRVLVSSAKNRGKSDDVPSIDIVKARKAFWKKLLDAKLISQRKYDNLTKAERGGLTPDDKAGFIQRQLVETRQITKHVARILDERFNNKVDDNNKPIRKVKIVTLKSNLVSNFRKEFGFYKIREVNNYHHAHDAYLNAVVAKAILTKYPQLEPEFVYGDYPKYNSYKTRKSATEKLFFYSNIMNFFKTKVTLADETVVVKDDIEVNNETGEIAWDKKKHFATVRKVLSYPQVNIVKKTEVQTGGFSKESILAHSNSDKLIPRKTKDIYLDPKKYGGFDSPIVAYSVLVLADIKKGKAQKLKTVKELIGITIMERERFEKNPSAFLESKGYLNIRTDKLIILPKYSLFELENGRRRLLASAGELQKGNELALPTQYMKFLYLASRYNESKGKPEEIEKKQEFVNQHISYFDDILQLINDFSKRVILADANLEKINKLYSDNKDNTPVDELAKNIINLFTFTSLGAPAAFKFFDKSVDRKRYTSTKEVLDSTLIHQSITGLYETRIDLGKLGED

SEQ ID NO: 644 - protein, 1378 aa, Streptococcus agalactiae
MNKPYSIGLDIGTNSVGWSIITDDYKVPAKKMRVLGNTDKEYIKKNLIGALLFDGGNTAADRRLKRTARRRYTRRRNRILYLQEIFAEEMSKVDDSFFHRLEDSFLVEEDKRGSKYPIFATMQEEKYYHEKFPTIYHLRKELADKKEKADLRLIYLALAHIIKFRGHFLIEDDRFDVRNTDIQKQYQAFLEIFDTTFENNDLLSQNVDVEAILTDKISKSAKKDRILARYPNQKSTGIFAEFLKLIVGNQADFKKHFNLEDKTPLQFAKDSYDEDLENLLGQIGDEFADLFSAAKKLYDSVLLSGILTVIDLSTKAPLSASMIQRYDEHHEDLKHLKQFVKASLPENYREVFADSSKDGYAGYIEGKTSQEAFYKYLLKLLTKQEGSEYLLEKIKNEDFLRKQRTFDNGSIPHQVHLTELRAIIRRQSEYYPFLKENLDRIEKILTFRIPYYVGPLAREKSDFAWMTRKTDDSIRPWNFEDLVDKEKSAEAFIHRMTNNDLYLPEEKVLPKHSLIYEKFTVYNELTKVRFLAEGFKDFQFLNRKQKETIFNSLFKEKRKVTEKDIISFLNKVDGYEGIAIKGIEKQFNASLSTYHDLKKILGKDFLDNTDNELILEDIIQTLTLFEDREMIKKRLDIYKDFFTESQLKKLYRRHYTGWGRLSAKLINGIRNKENQKTILDYLIDDGSANRNFMQLIKDAGLSFKPIIDKARTGSHSDNLKEVVGELAGSPAIKKGILQSLKIVDELVKVMGYEPEQIVVEMARENQTTAKGLSRSRQRLTTLRESLGNLKSNILEEKKPKYVKDQVENHHLSDDRLFLYYLQNGKDMYTDDELDIDNLSQYDIDHIIPQAFIKDDSIDNRVLVSSAKNRGKSDDVPSIEIVKARKMFWKNLLDAKLMSQRKYDNLTKAERGGLTSDDKARFIQRQLVETRQITKHVARILDERFNNELDSKGRRIRKVKIVTLKSNLVSNFRKEFGFYKIREVNNYHHAHDAYLNAVVAKAILTKYPQLEPEFVYGLYRRKKLSKIVREDKEEKYSEATRKMFFYSNLMNMFKRVVRLADGSIVVRPVIETGRYMGKTAWDKKKHFATVRKVLSYPQNNIVKKTEIQTGGFSKESILAHGNSDKLIPRKTKDIYLDPKKYGGFDSPIVAYSVLVVADIKKGKAQKLKTVTELLGITIMERSRFEKNTSAFLESKGYLNIRDDKLMILPKYSLFELENGRRRLLASAGELQKGNELALPTQFMKFLYLASRYNESKGKPEEIEKKQEFVNQHVSYFDDILQLINDFSNRVILADANLEKINKLYQDNKENIPVDELANNIINLFTFTSLGAPAAFKFFDKIVDRKRYTSTKEVLNSTLIHQSITGLYETRIDLGKLGEG

SEQ ID NO: 645 - protein, 1370 aa, Streptococcus agalactiae
MNKPYSIGLDIGTNSVGWSIITDDYKVPAKKMRVLGNTDKEYIKKNLIGALLFDGGNTAADRRLKRTARRRYTRRRNRILYLQEIFAEEMSKVDDSFFHRLEDSFLVEEDKRGSKYPIFATMQEEKYYHEKFPTIYHLRKELADKKEKADLRLIYLALAHIIKFRGHFLIEDDRFDVRNTDIQKQYQAFLEIFDTTFENNDLLSQNVDVEAILTDKISKSAKKDRILARYPNQKSTGIFAEFLKLIVGNQADFKKHFNLEDKTPLQFAKDSYDEDLENLLGQIGDEFADLFSAAKKLYDSVLLSGILTVTDLSTKAPLSASMIQRYDEHREDLKQLKQFVKASLPEKYQEIFADSSKDGYAGYIEGKTNQEAFYKYLSKLLTKQEGSEYLLEKIKNEDFLRKQRTFDNGSIPHQVHLTELRAIIRRQSEYYPFLKENLDRIEKILTFRIPYYVGPLAREKSDFAWMTRKTDDSIRPWNFEDLVDKEKSAEAFIHRMTNNDLYLPEEKVLPKHSLIYEKFTVYNELTKVRFLAEGFKDFQFLNRKQKETIFNSLFKEKRKVTEKDIISFLNKVDGYEGIAIKGIEKQFNASLSTYHDLKKILGKDFLDNTDNELILEDIVQTLTLFEDREMIRKRLDIYKDFFTESQLKKLYRRHYTGWGRLSAKLINGIRNKENQKTILDYLIDDGSANRNFMQLIKDAGLSFKPIIDKARTGSHSDNLKEVVGELAGSPAIKKGILQSLKIVDELVKVMGYEPEQIVVEMARENQTTAKGLSRLRQRLTTLRESLANLKSNILEEKKPKYVKDQVENHHLSDDRLFLYYLQNGKDMYTDDELDIDNLSQYDIDHIIPQAFIKDDSIDNRVLVSSAKNRGKSDDVPSVEIVKDCKVFWKKLLDAKLMSQRKYDNLTKAERGGLTSDDKARFIQRQLVETRQITKHVARILDERFNNELDSKGRRIRKVKIVTLKSNLVSNFRKEFGFYKIREVNNYHHAHDAYLNAVVAKAILTKYPQLEPEFVYGDYPKYNSYKTRKSATEKLFFYSNIMNFFKTKVTLADGTVVVKDDIEVNNDTGEIVWDKKKHFATVRKVLSYPQVNIVKKTEIQTGGFSKESILAHGNSDKLIPRKTKDIYLDPKKYGGFDSPIVAYSVLVVADIKKGKAQKLKTVTELLGITIMERSRFEKNPSAFLESKGYLNIRDDKLMILPKYSLFELENGRRRLLASADELQKGNELALPTQFMKFLYLASRYNELKGKPEEIEQKQEFVVQHVSYFDDILQIINDFSNRVILADANLEKINKLYQDNKENIPVDELANNIINLFTFTSLGAPAAFKFFDKIVDRKRYTSTKEVLNSTLIHQSITGLYETRIDLGKLGED

SEQ ID NO: 646 - protein, 1377 aa, Streptococcus agalactiae
MNKPYSIGLDIGTNSVGWSIITDDYKVPAKKMRVLGNTDKEYIKKNLIGALLFDGGNTAADRRLKRTARRRYTRRRNRILYLQEIFAEEMSKVDDSFFHRLEDSFLVEEDKRGSKYPIFATMQEEKYYHEKFPTIYHLRKELADKKEKADLRLVYLALAHIIKFRGHFLIEDDRFDVRNTDIQKQYQAFLEIFDTTFENNHLLSQNVDVEAILTDKISKSAKKDRILAQYPNQKSTGIFAEFLKLIVGNQADFKKHFNLEDKTPLQFAKDSYDEDLENLLGQIGDEFADLFSVAKKLYDSVLLSGILTVTDLSTKAPLSASMIQRYDEHHEDLKHLKQFVKASLPENYREVFADSSKDGYAGYIEGKTNQEAFYKYLLKLLTKQEGSEYFLEKIKNEDFLRKQRTFDNGSIPHQVHLTELRAIIRRQSEYYPFLKENQDRIEKILTFRIPYYVGPLAREKSDFAWMTRKTDDSIRPWNFEDLVDKEKSAEAFIHRMTNNDLYLPEEKVLPKHSLIYEKFTVYNELTKVRFLAEGFKDFQFLNRKQKETIFNSLFKEKRKVTEKDIISFLNKVDGYEGIAIKGIEKQFNASLSTYHDLKKILGKDFLDNTDNELILEDIVQTLTLFEDREMIKKCLDIYKDFFTESQLKKLYRRHYTGWGRLSAKLINGIRNKENQKTILDYLIDDGSANRNFMQLINDDDLSFKPIIDKARTGSHSDNLKEVVGELAGSPAIKKGILQSLKIVDELVKVMGYEPEQIVVEMARENQTTAKGLSRSRQRLTTLRESLANLKSNILEEKKPKYVKDQVENHHLSDDRLFLYYLQNGRDMYTKKALDIDNLSQYDIDHIIPQAFIKDDSIDNRVLVSSAKNRGKSDDVPSIEIVKARKMFWKNLLDAKLMSQRKYDNLTKAERGGLTSDDKARFIQRQLVETRQITKHVARILDERFNNEVDNGKKICKVKIVTLKSNLVSNFRKEFGFYKIREVNDYHHAHDAYLNAVVAKAILTKYPQLEPEFVYGMYRQKKLSKIVHEDKEEKYSEATRKMFFYSNLMNMFKRVVRLADGSIVVRPVIETGRYMGKTAWDKKKHFATVRKVLSYPQNNIVKKTEIQTGGFSKESILAHGNSDKLIPRKTKDIYLDPKKYGGFDSPIVAYSVLVVADIKKGKAQKLKTVTELLGITIMERSRFEKNPSAFLESKGYLNIRDDKLMILPKYSLFELENGRRRLLASAGELQKGNELALPTQFMKFLYLASRYNESKGKPEEIEKKQEFVNQHVSYFDDILQLINDFSKRVILADANLEKINKLYQDNKENIPVDELANNIINLFTFTSLGAPAAFKFFDKIVDRKRYTSTKEVLNSTLIHQSITGLYETRIDLGKLGED

SEQ ID NO: 647 - protein, 1370 aa, Streptococcus agalactiae
  misc_feature (117)..(117): Xaa can be any naturally occurring amino acid
MNKPYSIGLDIGTNSVGWSIITDDYKVPAKKMRVLGNTDKEYIKKNLIGALLFDGGNTAADRRLKRTARRRYTRRRNRILYLQEIFAEEMSKVDDSFFHRLEDSFLVEEDKRGSKYXIFATLQEEKDYHEKFSTIYHLRKELADKKEKADLRLIYIALAHIIKFRGHFLIEDDSFDVRNTDISKQYQDFLEIFNTTFENNDLLSQNVDVEAILTDKISKSAKKDRILAQYPNQKSTGIFAEFLKLIVGNQADFKKYFNLEDKTPLQFAKDSYDEDLENLLGQIGDEFADLFSAAKKLYDSVLLSGILTVIDLSTKAPLSASMIQRYDEHREDLKQLKQFVKASLPEKYQEIFADSSKDGYAGYIEGKTNQEAFYKYLSKLLTKQEDSENFLEKIKNEDFLRKQRTFDNGSIPHQVHLTELKAIIRRQSEYYPFLKENQDRIEKILTFRIPYYIGPLAREKSDFAWMTRKTDDSIRPWNFEDLVDKEKSAEAFIHRMTNNDFYLPEEKVLPKHSLIYEKFTVYNELTKVRYKNEQGETYFFDSNIKQEIFDGVFKEHRKVSKKKLLDFLAKEYEEFRIVDVIGLDKENKAFNASLGTYHDLEKILDKDFLDNPDNESILEDIVQTLTLFEDREMIKKRLENYKDLFTESQLKKLYRRHYTGWGRLSAKLINGIRDKESQKTILDYLIDDGRSNRNFMQLINDDGLSFKSIISKAQAGSHSDNLKEVVGELAGSPAIKKGILQSLKIVDELVKVMGYEPEQIVVEMARENQTTNQGRRNSRQRYKLLDDGVKNLASDLNGNILKEYPTDNQALQNERLFLYYLQNGRDMYTGEALDIDNLSQYDIDHIIPQAFIKDDSIDNRVLVSSAKNRGKSDDVPSLEIVKDCKVFWKKLLDAKLMSQRKYDNLTKAERGGLTSDDKARFIQRQLVETRQITKHVARILDERFNNELDSKGRRIRKVKIVTLKSNLVSNFRKEFGFYKIREVNNYHHAHDAYLNAVVAKAILTKYPQLEPEFVYGDYPKYNSYKTRKSATEKLFFYSNIMNFFKTKVTLADGTVVVKDDIEVNNDTGEIVWDKKKHFATVRKVLSYPQNNIVKKTEIQTGGFSKESILAHGNSDKLIPRKTKDIYLDPKKYGGFDSPIVAYSVLVVADIKKGKAQKLKTVTELLGITIMERSRFEKNPSAFLESKGYLNIRADKLIILPKYSLFELENGRRRLLASAGELQKGNELALPTQFMKFLYLASRYNESKGKPEEIEKKQEFVNQHVSYFDDILQLINDFSKRVILADANLEKINKLYQDNKENISVDELANNIINLFTFTSLGAPAAFKFFDKIVDRKRYTSTKEVLNSTLIHQSITGLYETRIDLGKLGED

SEQ ID NO: 648 - protein, 1370 aa, Streptococcus agalactiae
MNKPYSIGLDIGTNSVGYSVVTDDYKVPAKKMRVLGNTDKEYIKKNLIGALLFDGGNTASDRRLKRTARRRYTRRRNRILYLQEIFAEEMSKVDDSFFHRLEDSFLVEDDKRGSKYPIFATMQEEKDYHEKFPTIYHLRKELADKKEKADLRLVYLALAHIIKFRGHFLIEDDSFDVRNTDIQRQYQAFLEIFDTTFENNHLLSQNIDVEGILTDKISKSAKKDRILAQYPNQKSTGIFAEFLKLIVGNQADFKKHFNLEDKTPLQFAKDSYDEDLENLLGQIGDEFADLFSVAKKLYDSVLLSGILTVTDLSTKAPLSASMIQRYDEHREDLKQLKQFVKASLPEKYQEIFTDSSKDGYAGYIEGKTNQGAFYKYLSKLLTKQEGSEYFLEKIKNEDFLRKQRTFDNGSIPHQVHLTELKAIIRRQSEYYPFLKENLDRIEKILTFRIPYYVGPLAREKSDFAWMTRKTDDSIRPWNFEELVDKEASAEAFIHRMTNNDLYLPEEKVLPKHSLIYEKFTVYNELTKVRYKNEQGETYFFDSNIKQEIFDGVFKEHRKVSKKKLLDFLAKEYEEFRIVDVIGLDKENKAFNASLGTYHDLKKILDKDFLDNPDNESILEDIVQTLTLFEDREMIKKRLENYKDLFTESQLKKLYRRHYTGWGRLSAKLINGIRDKESQKTILDYLISDGRANRNFMQLIHDDGLSFKPIIDKAQAGSHSDNLKEVVGELAGSPAIKKGILQSLKIVDELVKVMGYEPEQVVVEMARENQTTNQGRRNTRQRYKLLEEGVKNLASDLNGNILKEYPTDNQALQNERLFLYYLQNGRDMYTGEALDIDNLSQYDIDHIVPQAFIKDDSIDNRVLVSSAKNRGKSDNVPSIDIVKARKAFWKKLLDAKLMSQRKYDNLTKAERGGLTSDDKARFIQRQLVETRQITKHVARILDERFNNELDSKGRRIRKVKIVTLKSNLVSNFRKEFGFYKIREVNDYHHAHDAYLNAVVAKAILTKYPQLEPEFVYGDYPKYNSYKTRKSATEKLFFYSNIMNFFKTKVTLADGTVVVKDDIEVNNDTGEIVWDKKKHFATVRKVLSYPQVNIVKKTEIQTGGFSKESILAHGNSDKLIPRKTKDIYLDPKKYGGFDSPIVAYSVLVVADIKKGKAQKLKTVTELLGITIMERFRFEKNPSAFLESKGYLNIRDDKLMILPKYSLFELENGRRRLLASAGELQKGNELALPTQYMKFLYLASRYNELKGKPEEIEQKQEFVVQHVSYFDDILQIINDFSNRVILADANLEKINKLYQDNKENISVDELANNIINLFTFTSLGAPAAFKFFDKIVDRKRYTSTKEVLNSTLIHQSITGLYETRIDLGKLGED

SEQ ID NO: 649 - protein, 1370 aa, Streptococcus agalactiae
MNKPYSIGLDIGTNSVGYSVVTDDYKVPAKKMRVLGNTDKEYIKKNLIGALLFDGGNTASDRRLKRTARRRYTRRRNRILYLQEIFAEEMSKVDDSFFHRLEDSFLVEDDKRGSKYPIFATMQEEKDYHEKFPTIYHLRKELADKKEKANLRLVYLALAHIIKFRGHFLIEDDSFDVRNTDIQRQYQAFLEIFDTTFENNHLLSQNIDVEGILTDKISKSAKKDRILAQYPNQKSTGIFAEFLKLIVGNQADFKKHFNLEDKTPLQFAKDSYDEDLENLLGQIGDEFADLFSVAKKLYDSVLLSGILTVTDLSTKAPLSASMIQRYDEHREDLKQLKQFVKASLPEKYQEIFTDSSKDGYAGYIEGKTNQGAFYKYLSKLLTKQEGSEYFLEKIKNEDFLRKQRTFDNGSIPHQVHLTELKAIIRRQSEYYPFLKENLDRIEKILTFRIPYYVGPLAREKSDFAWMTRKTDDSIRPWNFEELVDKEASAEAFIHRMTNNDLYLPEEKVLPKHSLIYEKFTVYNELTKVRYKNEQGETYFFDSNIKQEIFDGVFKEHRKVSKKKLLDFLAKEYEEFRIVDVIGLDKENKAFNASLGTYHDLKKILDKDFLDNPDNESILEDIVQTLTLFEDREMIKKRLENYKDLFTESQLKKLYRRHYTGWGRLSAKLINGIRDKESQKTILDYLISDGRANRNFMQLIHDDGLSFKPIIDKAQAGSHSDNLKEVVGELAGSPAIKKGILQSLKIVDELVKVMGYEPEQVVVEMARENQTTNQGRRNTRQRYKLLEEGVKNLASDLNGNILKEYPTDNQALQNERLFLYYLQNGRDMYTGEALDIDNLSQYDIDHIVPQAFIKDDSIDNRVLVSSAKNRGKSDNVPSIDIVKARKAFWKKLLDAKLMSQRKYDNLTKAERGGLTSDDKARFIQRQLVETRQITKHVARILDERFNNELDSKGRRIRKVKIVTLKSNLVSNFRKEFGFYKIREVNDYHHAHDAYLNAVVAKAILTKYPQLEPEFVYGDYPKYNSYKTRKSATEKLFFYSNIMNFFKTKVTLADGTVVVKDDIEVNNDTGEIVWDKKKHFATVRKVLSYPQVNIVKKTEIQTGGFSKESILAHGNSDKLIPRKTKDIYLDPKKYGGFDSPIVAYSVLVVADIKKGKAQKLKTVTELLGITIMERFRFEKNPSAFLESKGYLNIRDDKLMILPKYSLFELENGRRRLLASAGELQKGNELALPTQYMKFLYLASRYNELKGKPEEIEQKQEFVVQHVSYFDDILQIINDFSNRVILADANLEKINKLYQDNKENISVDELANNIINLFTFTSLGAPAAFKFFDKIVDRKRYTSTKEVLNSTLIHQSITGLYETRIDLGKLGED

SEQ ID NO: 650 - protein, 1370 aa, Streptococcus agalactiae
  misc_feature (9)..(9): Xaa can be any naturally occurring amino acid
MNKPYSIGXDIGTNSVGWSIITDDYKVPAKKMRVLGNTDKEYIKKNLIGALLFDGGNTAADRRLKRTARRRYTRRRNRILYLQEIFAEEMSKVDDSFFHRLEDSFLVEEDKRGSKYPIFATLQEEKDYHEKFSTIYHLRKELADKKEKADLRLIYIALAHIIKFRGHFLIEDDSFDVRNTDISKQYQDFLEIFNTTFENNDLLSQNVDVEAILTDKISKSAKKDRILAQYPNQKSTGIFAEFLKLIVGNQADFKKYFNLEDKTPLQFAKDSYDEDLENLLGQIGDEFADLFSAAKKLYDSVLLSGILTVIDLSTKAPLSASMIQRYDEHREDLKQLKQFVKASLPEKYQEIFADSSKDGYAGYIEGKTNQEAFYKYLSKLLTKQEDSENFLEKIKNEDFLRKQRTFDNGSIPHQVHLTELKAIIRRQSEYYPFLKENQDRIEKILTFRIPYYIGPLAREKSDFAWMTRKTDDSIRPWNFEDLVDKEKSAEAFIHRMTNNDFYLPEEKVLPKHSLIYEKFTVYNELTKVRYKNEQGETYFFDSNIKQEIFDGVFKEHRKVSKKKLLDFLAKEYEEFRIVDVIGLDKENKAFNASLGTYHDLEKILDKDFLDNPDNESILEDIVQTLTLFEDREMIKKRLENYKDLFTESQLKKLYRRHYTGWGRLSAKLINGIRDKESQKTILDYLIDDGRSNRNFMQLINDDGLSFKSIISKAQAGSHSDNLKEVVGELAGSPAIKKGILQSLKIVDELVKVMGYEPEQIVVEMARENQTTNQGRRNSRQRYKLLDDGVKNLASDLNGNILKEYPTDNQALQNERLFLYYLQNGRDMYTGEALDIDNLSQYDIDHIIPQAFIKDDSIDNRVLVSSAKNRGKSDDVPSLEIVKDCKVFWKKLLDAKLMSQRKYDNLTKAERGGLTSDDKARFIQRQLVETRQITKHVARILDERFNNELDSKGRRIRKVKIVTLKSNLVSNFRKEFGFYKIREVNNYHHAHDAYLNAVVAKAILTKYPQLEPEFVYGDYPKYNSYKTRKSATEKLFFYSNIMNFFKTKVTLADGTVVVKDDIEVNNDTGEIVWDKKKHFATVRKVLSYPQNNIVKKTEIQTGGFSKESILAHGNSDKLIPRKTKDIYLDPKKYGGFDSPIVAYSVLVVADIKKGKAQKLKTVTELLGITIMERSRFEKNPSAFLESKGYLNIRADKLIILPKYSLFELENGRRRLLASAGELQKGNELALPTQFMKFLYLASRYNESKGKPEEIEKKQEFVNQHVSYFDDILQLINDFSKRVILADANLEKINKLYQDNKENISVDELANNIINLFTFTSLGAPAAFKFFDKIVDRKRYTSTKEVLNSTLIHQSITGLYETRIDLGKLGED

SEQ ID NO: 651 - protein, 1125 aa, Streptococcus anginosus
MNGLVLGLDIGIASVGVGILNKETGEIIHANSRIFPAATADSNVERRGFRQGRRLGRRKKHRSARLNNLFEEFGFITDFSAIPLNLNPYALRVKGLSEELTNEELFIALKNIIKRRGISYLDDASEDGETASNEYGKAVEENRKLLADKTPGQIQLERFEKYGQVRGDFTVVENGENHRLINVFSTSAYKKEAERILRRQQEFNVRISDEFIEAYLTILTGKRKYYHGPGNEKSRTDYGRFRTDGTTLDNIFGILIGKCTFYPDEYRAAKASYTAQEFNLLNDLNNLTVPTETKKLSPEQKRQIVEYARTAKTLGTPTLLKYIAKLVDGSIDDIKGYRIDKSDKPEMHTFDAYRKMRTLDLVNIDALSRETLDDLAHILTLNTESEGILEALNSKMPSTFTKEQIDELIQFRKKNSAVFGKGWHNFSLKLMNELISELYETSEEQMTILTRLGKQRSREISKRTKYIDEKELTEEIYNPVVAKSVRQAIKIINEATKRYGIFDNIVIEMARENNEEDAKKDYIKRQKANQDEKNASMEKAAFQYNGKKELPDSIFHGHKELATKIRLWHQQGERCLYTGKNISIRDLIHNPHQYEIDHILPLSLSFDDGLANKVLVLATANQEKGQRTPFQAIDSMDDAWSYREFKQYVRNSKSLSNKKKDYLLTEEDISKIEVKQKFIERNLVDTRYSSRVVLNTLQEFYKTNDFDTKISVVRGQFTSQLRRKWKIEKSRDTYHHHAVDALIIAASSQLRLWKKQNNPLISYKEGQFVDPETGEILSLTDDEYKELVFRPPYDYFVDTLKSKSFEDSILFSYQVDSKYNRKISDATIYGTRKAQLGKDKQEETYVLGKIKDIYSQKGYEDFIKRYNKDETQFLIYHKDPQTFEKVIEEILKTYPDKELNEKGKEIPCNPFEKYRQENGPIRKYSKKGKGPEIKSLKYYDNKLGNHIDITPVNSQNQVVLQSLKPWRTDVYFNPRTSKYELMGLKYSDLRFEKGSGSYGISPEKYNKVKAKEGVNEDSEFKFTLYKNDLILIKDTETGEQQLFRYGSRNDTSKHYVELKPYEKAKFEGNQQLMNLLGTVAKGGQCLKGINKPNLSIYKVKTDVLGNKYFIKKEGDQPQLNFKKKF

SEQ ID NO: 652 - protein, 1386 aa, Streptococcus anginosus
MNQKYSIGLDIGTNSVGWAVITDDYKVPAKKMKVLGNTDKQSIKKNLLGALLFDSGETAEATRLKRTARRRYTRRRNRLRYLQEIFAEEMMQVDESFFQRLDDSFLVDEDKRGERHPIFGNIAAEVKYHDEFPTIYHLRKHLADISQKADLRLVYLALAHMIKFRGHFLIEGQLKAENTNVQALFKDFVEVYDKTVEESHLSEITVDALSILTEKVSKSRRLENLIAHYPAEKKNTLFGNLIALFLGLQPNFKTNFQLSEDAKLQFSKDTYEEDLEGLLGEVGDEYADLFASAKNLYDAILLSGILTVDDNSTKAPLSASMVKRYEEHQKDLKKFEDFIKVNALDQYNAIFKDKNKKGYAGYIESGVKQDEFYKYLKGILLQINGSGDFLDKIDREDFLRKQRTFDNGSIPHQIHLQEMHAILRRQGEHYPFLKENQDKIEKILTFRIPYYVGPLARKGSRFAWAEYKADEKITPWNFDDILDKEKSAEKFITRMTLNDLYLPEEKVLPKHSLLYETFTVYNELTKVKYVNEQGEAKFFDANMKQEIFDHVFKENRKVTKDKLLNYLNKEFEEFRIVNLTGLDKENKVFNSSLGTYHDLRKILNKSFLDNKENAQIIEDIIQTLTLFEDREMIRQRLQKYSDIFTKAQLKKLERRHYTGWGRLSYKLINGIRNKENKKTILDYLIDDGYANRNFMQLINDDALSFKEEIAKAQIIGDVDDIANVVHDLPGSPAIKKGILQSVKIVDELVKVMGHNPANIIIEMARENQTTDRGRRNSQQRLKLLQDSLKNLDNPVNIKNVENQQLQNDRLFLYYIQNGKDMYTGETLDINNLSQYDIDHIIPQAYIKDDSFDNRVLTSSSENRGKSDNVPSIEVVCARKADWMRLRKAGLISQRKFDNLTKAERGGLTENDKAGFIKRQLVETRQITKHVAQVLDARFNAKHDENKKVIRDVKIITLKSNLVSQFRKDFKFYKVREINDYHHAHDAYLNAVIGTALLKKYPKLASEFVYGEFKKYDVRKFIAKSDKEIGKATAKYFFYSNLMNFFKKEVKFADGTVVERPDIETSEDGEIAWNKQTDFKIVRKVLSYPQVNIVKKTEVQTHGLDRGKPRGLFNANPSPKPKPDSSENLVGVKRNLDPKKYGGYAGISNSYAVLVKAIIEKGVKKKETMVLEFQGISILDRITFEKDKRAFLLGKGYKDIKKIIELPKYSLFELKDGSRRMLASILSTNNKRGEIHKGNELFVPQKFTTLLYHAKRINNPINKDHIEYVKKHRDDFKELLNYVLEFNEKYVGATKNGERLKEAVADFDSKSNEEICTSFLGAVNSKNAGLFELTSLGSASDFEFLGVKIPRYRDYTPSSLLKDSTLIHQSITGLYETRIDLSKLGED

SEQ ID NO: 653 - protein, 1396 aa, Streptococcus anginosus
MTKPYSIGLDIGTNSVGWAVITDDYKVPAKKMKVLGNTNRDYIKKNLLGALLFDGGETAEGRRLKRTARRRYTRRKNRLRYLQEIFAEEMMQVDESFFQRLDDSFLVEEDKQGSKYPIFGTLKEEKEYHKKFKTIYHLREELANSKEKADLRLVYLALAHMIKFRGHFLYEGDLKAENTDVQALFKDFVEEYDKTIEESHLSEITVDALSILTEKVSKSSRLENLIAHYPTEKKNTLFGNLIALSLGLQANFKTNFQLSEDAKLQFSKDTYEEDLEGLLGEVGDEYADLFVSAKNLYDAILLSGILTVDDNSTKAPLSASMVKRYKEHKEELAAFKRFIKEKLPKKYEEIFKDDTKNGYAGYVGADKKLRKRSGKLATEEEFYKYVKGILNKVEGADYFLDKIDREDFLRKQRTFDNGSIPHQIHLQEMHAILRRQGEHYPFLKENQDKIEKILTFRIPYYVGPLARKGSRFAWAEYKADEKITPWNFDDILDKEKSAEKFITRMTLNDLYLPEEKVLPKHSPLYETFTVYNELTKVKYVNEQGEAKFFDTNMKQEIFDHVFKENRKVTKDKLLNYLNKEFEEFRIVNLTGLDKENKAFNASLGTYHDLRKILDKSFLDDKVNEKIIEDIIQTLTLFEDREMIRQRLQKYSDIFTTQQLKELERRHYTGWGRLSYKLINGIRNKENKKTILDYLIDDGYANRNFMQLINDDALSFKEEIARAQIIGDVDDIANVVHDLPGSPAIKKGILQSVKIVDELVKVMGHNPTNIIIEMARENQTTDKGRRNSQQRLKLLQDSLKNLDNPVNIKNVENQQLQNDRLFLYYIQNGKDMYTGETLDINNLSQYDIDHIIPQAFIKDNSLDNRVLTRSDKNRGKSDDVPSIEVVHEMKSFWSKLLSVKLITQRKFDNLTKAERGGLTENDKAGFIKRQLVETRQITKHVAQVLDARFNAKHDENKKVIRDVKIITLKSNLVSQFRKDFKFYKVREINDYHHAHDAYLNAVIGTALLKKYPKLASEFVYGEFKKYDVRKFIAKSDKEIGKATAKYFFYSNLMNFFKKEVKFADGTVVERPDIETSEDGEIAWNKQTDFKIVRKVLSYPQVNIVKKTEVQTHGLDRGKPRGLFNANPSPKPKPDSSENLVGIKRNLDPKKYGGYAGISNSYAVLVKAIIEKGVKKKETMVLEFQGISILDRITFEKDKRAFLLGKGYKDIKKIIELPKYSLFELKDGSRRMLASILSTNNKRGEIHKGNELFVPQKFTTLLYHAKRINNPINKDHIEYVKKHRDDFKELLNYVLEFNEKYVGATKNGERLKEAVADFDSKSNEEICTSFLGAVNSKNAGLFELTSLGSASDFEFLGVKIPRYRDYTPSSLLKDSILIHQSITGLYETRIDLSKLGED

SEQ ID NO: 654 - protein, 1375 aa, Streptococcus canis
MEKKYSIGLDIGTNSVGWAVITDDYKVPSKKFKVLGNTNRKSIKKNLMGALLFDSGETAEATRLKRTARRRYTRRKNRIRYLQEIFANEMAKLDDSFFQRLEESFLVEEDKKNERHPIFGNLADEVAYHRNYPTIYHLRKKLADSPEKADLRLIYLALAHIIKFRGHFLIEGKLNAENSDVAKLFYQLIQTYNQLFEESPLDEIEVDAKGILSARLSKSKRLEKLIAVFPNEKKNGLFGNIIALALGLTPNFKSNFDLTEDAKLQLSKDTYDDDLDELLGQIGDQYADLFSAAKNLSDAILLSDILRSNSEVTKAPLSASMVKRYDEHHQDLALLKTLVRQQFPEKYAEIFKDDTKNGYAGYVGIGIKHRKRTTKLATQEEFYKFIKPILEKMDGAEELLAKLNRDDLLRKQRTFDNGSIPHQIHLKELHAILRRQEEFYPFLKENREKIEKILTFRIPYYVGPLARGNSRFAWLTRKSEEAITPWNFEEVVDKGASAQSFIERMTNFDEQLPNKKVLPKHSLLYEYFTVYNELTKVKYVTERMRKPEFLSGEQKKAIVDLLFKTNRKVTVKQLKEDYFKKIECFDSVEIIGVEDRFNASLGTYHDLLKIIKDKDFLDNEENEDILEDIVLTLTLFEDREMIEERLKTYAHLFDDKVMKQLKRRHYTGWGRLSRKMINGIRDKQSGKTILDFLKSDGFSNRNFMQLIHDDSLTFKEEIEKAQVSGQGDSLHEQIADLAGSPAIKKGILQTVKIVDELVKVMGHKPENIVIEMARENQTTTKGLQQSRERKKRIEEGIKELESQILKENPVENTQLQNEKLYLYYLQNGRDMYVDQELDINRLSDYDVDHIVPQSFIKDDSIDNKVLTRSVENRGKSDNVPSEEVVKKMKNYWRQLLNAKLITQRKFDNLTKAERGGLSEADKAGFIKRQLVETRQITKHVARILDSRMNTKRDKNDKPIREVKVITLKSKLVSDFRKDFQLYKVRDINNYHHAHDAYLNAVVGTALIKKYPKLESEFVYGDYKVYDVRKMIAKSEQEIGKATAKRFFYSNIMNFFKTEVKLANGEIRKRPLIETNGETGEVVWNKEKDFATVRKVLAMPQVNIVKKTEVQTGGFSKESILSKRESAKLIPRKKGWDTRKYGGFGSPTVAYSILVVAKVEKGKAKKLKSVKVLVGITIMEKGSYEKDPIGFLEAKGYKDIKKELIFKLPKYSLFELENGRRRMLASATELQKANELVLPQHLVRLLYYTQNISATTGSNNLGYIEQHREEFKEIFEKIIDFSEKYILKNKVNSNLKSSFDEQFAVSDSILLSNSFVSLLKYTSFGASGGFTFLDLDVKQGRLRYQTVTEVLDATLIYQSITGLYETRTDLSQLGGD

SEQ ID NO: 655 - protein, 1345 aa, Streptococcus constellatus
MGKPYSIGLDIGTNSVGWAVVTDDYKVPAKKMKVLGNTDKQSIKKNLLGALLFDSGETAEATRLKRTARRRYTRRKNRLRYLQEIFTGEMNKVDENFFQRLDDSFLVDEDKRGEHHPIFGNIAAEVKYHDDFPTIYHLRRHLADTSKKADLRLVYLALAHMIKFRGHFLYEGDLKAENTDVQALFKDFVEEYDKTIEESHLSEITVDALSILTEKVSKSSRLENLIAHYPTEKKNTLFGNLIALSLDLHPNFKTNFQLSEDAKLQFSKDTYEEDLEGFLGEVGDEYADLFASAKNLYDAILLSGILTVDDNSTKAPLSASMVKRYEEHQKDLKKLKDFIKVNAPDQYNAIFKDKNKKGYASYIESGVKQDEFYKYLKGILLKINGSGDFLDKIDREDFLRKQRTFDNGSIPHQIHLQEMHAILRRQGEHYPFLKENQDKIEKILTFRIPYYVGPLARKGSRFAWAEYKADEKITPWNFDDILDKEKSAEKFITRMTLNDLYLPEEKVLPKHSPLYEAFTVYNELTKVKYVNEQGEAKFFDTNMKQEIFDHVFKENRKVTKDKLLNYLNKEFEEFRIVNLTGLDKENKAFNSSLGTYHDLRKILDKSFLDDKANEKTIEDIIQTLTLFEDREMIRQRLQKYSDIFTKAQLKKLERRHYTGWGRLSYKLINGIRNKENKKTILDYLIDDGYANRNFMQLINDDALSFKEEIARAQIIDDVDDIANVVHDLPGSPAIKKGILQSVKIVDELVKVMGHNPANIIIEMARENQTTDKGRRNSQQRLKLLQDSLKNLDNPVNIKNVENQQLQNDRLFLYYIQNGKDMYTGETLDINNLSQYDIDHIIPQAFIKDNSLDNRVLTRSDKNRGKSDDVPSIEVVHEMKSFWSKLLSVKLITQRKFDNLTKAERGGLTEEDKAGFIKRQLVETRQITKHVAQILDERFNTEFDGNKRRIRNVKIITLKSNLVSNFRKEFELYKVREINDYHHAHDAYLNAVVGNALLLKYPQLEPEFVYGEYPKYNSYRSRKSATEKFLFYSNILRFFKKEDIQTNEDGEIAWNKEKHIKILRKVLSYPQVNIVKKTEEQTGGFSKESILPKGESDKLIPRKTKNSYWDPKKYGGFDSPVVAYSILVFADVEKGKSKKLRKVQDMVGITIMEKKRFEKNPVDFLEQRGYRNVRLEKIIKLPKYSLFELENKRRRLLASAKELQKGNELVIPQRFTTLLYHSYRIEKDYEPEHREYVEKHKDEFKELLEYISVFSRKYVLADNNLTKIEMLFSKNKDAEVSSLAKSFISLLTFTAFGAPAAFNFFGENIDRKRYTSVTECLNATLIHQSITGLYETRIDLSKLGED

SEQ ID NO: 656 - protein, 538 aa, Streptococcus dysgalactiae
DYDVDHIVPQSFIKDDSIDNKVLTRSDKNRGKSDNVPSEEVVKKMKNYWRQLLNAKLITQRKFDNLTKAERGGLSELDKAGFIKRQLVETRQITKHVAQILDSRMNTKYDENDKLIREVKVITLKSKLVSDFRKDFQFYKVREINNYHHAHDAYLNAVVGTALIKKYPKLESEFVYGDYKVYDVRKMIAKSEQEIGKATAKRFFYSNIMNFFKTEITLANGEIRKRPLIETNEETGEIVWDKGRDFATVRKVLSMPQVNIVKKTEVQTGALTNESIYARGSFDKLISRKHRFESSKYGGFGSPTVTYSVLVVAKSKVQDGKVKKIKTGKELIGITLLDKLVFEKNPLKFIEDKGYGNVQIDKCIRLPKYSLFEFENGTRRMLASVMANNNSRGDLQKANEMFLPAKLVTLLYHAHKIESSKELEHEAYILDHYNDLYQLLSYIERFASLYVDVEKNISKVKELFSNIESYSISEICSSVINLLTLTASGAPADFKFLGTTIPRKRYGSPQSILSSTLIHQSITGLYETRIDLSQLGGD

SEQ ID NO: 657 - protein, 1155 aa, Streptococcus dysgalactiae
MDKKYSIGLDIGTNSVGWAVITDDYKVPSKKFKVLGNTDRHSIKKNLIGALLFDSGETAEATRLKRSARRRYTRRKNRIRYLQEIFSSEMSKVDDSFFHRLEESFLVEEDKKHERHPIFGNIVDEVAYHEKYPTIYHLRKKLADSTDKADLRLIYLALAHMIKFRGHFLIEGDLNPDNSDMDKLFIQLVQTYNQLFEENPINASRVDAKAILSARLSKSRRLENLIAQLPGEKRNGLFGNLIALSLGLTPNFKSNFDLAEDAKLQLSKDTYDDDLDNLLAQIGDQYADLFLAAKNLSDAILLSDILRVNSEITKAPLSASMIKRYDEHHQDLTLLKALVRQQLPEKYKEIFFDQSKNGYAGYIDGGASQEEFYKFIKPILEKMDGTEELLAKLNREDLLRKQRTFDNGSIPHQIHLGELHAILRRQEDFYPFLKDNREKIEKILTFRIPYYVGPLARGNSRFAWMTRKSEETITPWNFEEVVDKGASAQSFIERMTNFDKNLPNEKVLPKHSLLYEYFTVYNELTKVKYVTEGMRKPEFLSGKQKEAIVDLLFKTNRKVTVKQLKEDYFKKIECFDSVEISGVEDRFNASLGTYHDLLKIIKDKDFLDNEENEDILEDIVLTLTLFEDKEMIEERLKTYAHLFDDKVMKQLKRRHYTGWGRLSRKLINGIRDKQSGKTILDFLKSDGFANRNFIQLIHDDSLTFKEAIQKAQVSGQGHSLHEQIANLAGSPAIKKGILQSVKVVDELVKVMGHKPENIVIEMARENQTTQKGQKNSRERMKRIEEGIKELGSQILKEHPVENTQLQNEKLYLYYLQNRRDMYVDQELDINRLSDYDVDHIVPQSFIKDDSIDNKVLTRSDKNRGKSDDVPSEEVVKKMKNYWRQLLNAKLITQRKFDNLTKAERGGLSELDKAGFIKRQLVETRQITKHVAQILDSRMNTKYDENDKLIREVKVITLKSKLVSDFRKDFQFYKVREINNYHHAHDAYLNAVVGTALIKKYPKLESEFVYGDYKVYDVRKMIAKSEQEIGKATAKRFFYSNIMNFFKTEITLANGEIRKRPLIETNEETGEIVWDKGRDFATVRKVLSMPQVNIVKKTEVQTGALTNESIYARGSFDKLISRKHRFESSKYGGFGSPTVTYSVLVVAKYQSYKMEK

SEQ ID NO: 658 - protein, 1371 aa, Streptococcus dysgalactiae
MDKKYSIGLDIGTNSVGWAVITDDYKVPSKKFKVLGNTDRHSIKKNLIGALLFDSGETAEATRLKRTARRRYTRRKNRIRYLQEIFSSEMSKVDDSFFHRLEESFLVEEDKKHERHPIFGNIVDEVAYHEKYPTIYHLRKKLADSTDKADLRLIYLALAHMIKFRGHFLIEGDLNPDNSDMDKLFIQLVQTYNQLFEENPINASRVDAKAILSARLSKSRRLENLIAQLPGEKRNGLFGNLIALSLGLTPNFKSNFDLAEDAKLQLSKDTYDDDLDNLLAQIGDQYADLFLAAKNLSDAILLSDILRVNSEITKAPLSASMIKRYDEHHQDLTLLKALVRQQLPEKYKEIFFDQSKNGYAGYIDGGASQEEFYKFIKPILEKMDGTEELLAKLNREDLLRKQRTFDNGSIPHQIHLGELHAILRRQEDFYPFLKDNREKIEKILTFRIPYYVGPLARGNSRFAWMTRKSEETITPWNFEEVVDKGASAQSFIERMTNFDKNLPNEKVLPKHSLLYEYFTVYNELTKVKYVTEGMRKPEFLSGKQKEAIVDLLFKTNRKVTVKQLKEDYFKKIECFDSVEISGVEDRFNASLGTYHDLLKIIKDKDFLDNEENEDILEDIVLTLTLFEDKEMIEERLKTYAHLFDDKVMKQLKRRHYTGWGRLSRKLINGIRDKQSGKTILDFLKSDGFANRNFIQLIHDDSLTFKEAIQKAQVSGQGHSLHEQIANLAGSPAIKKGILQSVKVVDELVKVMGHKPENIVIEMARENQTTQKGQKNSRERMKRIEEGIKELGSQILKEHPVENTQLQNEKLYLYYLQNGRDMYVDQELDINRLSDYDVDHIVPQSFIKDDSIDNKVLTRSDKNRGKSDDVPSEEVVKKMKNYWRQLLNAKLITQRKFDNLTKAERGGLSELDKAGFIKRQLVETRQITKHVAQILDSRMNTKYDENDKLIREVKVITLKSKLVSDFRKDFQFYKVREINNYHHAHDAYLNAVVGTALIKKYPKLESEFVYGDYKVYDVRKMIAKSEQEIGKATAKRFFYSNIMNFFKTEITLANGEIRKRPLIETNEETGEIVWNKGRDFATVRKVLSMPQVNIVKKTEVQTGALTNESIYARGSFDKLISRKHRFESSKYGGFGSPTVTYSVLVVAKSKVQDGKVKKIKTGKELIGITLLDKLVFEKNPLKFIEDKGYGNVQIDKCIKLPKYSLFEFENGTRRMLASVMANNNSRGDLQKANEMFLPAKLVTLLYHAHKIESSKELEHEAYILDHYNDLYQLLSYIERFASLYVDVEKNISKVKELFSNIESYSISEICSSVINLLTLTASGAPADFKFLGTTIPRKRYGSPQSILSSTLIHQSITGLYETRIDLSQLGGD

SEQ ID NO: 659 - protein, 1371 aa, Streptococcus dysgalactiae
MDKKYSIGLDIGTNSVGWAVITDDYKVPSKKFKVLGNTDRHSIKKNLIGALLFDSGETAEATRLKRTARRRYTRRKNRIRYLQEIFSSEMSKVDDSFFHRLEESFLVEEDKKHERHPIFGNIVDEVAYHEKYPTIYHLRKKLADSTDKADLRLIYLALAHMIKFRGHFLIEGDLNPDNSDMDKLFIQLVQTYNQLFEENPINASRVDAKAILSARLSKSRRLENLIAQLPGEKRNGLFGNLIALSLGLTPNFKSNFDLAEDAKLQLSKDTYDDDLDNLLAQIGDQYADLFLAAKNLSDAILLSDILRVNSEITKAPLSASMIKRYDEHHQDLTLLKALVRQQLPEKYKEIFFDQSKNGYAGYIDGGASQEEFYKFIKPILEKMDGTEELLAKLNREDLLRKQRTFDNGSIPHQIHLGELHAILRRQEDFYPFLKDNREKIEKILTFRIPYYVGPLARGNSRFAWMTRKSEETITPWNFEEVVDKGASAQSFIERMTNFDKNLPNEKVLPKHSLLYEYFTVYNELTKVKYVTEGMRKPEFLSGKQKEAIVDLLFKTNRKVTVKQLKEDYFKKIECFDSVEISGVEDRFNASLGTYHDLLKIIKDKDFLDNEENEDILEDIVLTLTLFEDKEMIEERLKKYANLFDDKVMKQLKRRHYTGWGRLSRKLINGIRDKQSGKTILDFLKSDGFANRNFMQLINDDSLTFKEAIQKAQVSGQGHSLHEQIANLAGSPAIKKGILQSVKVVDELVKVMGHKPENIVIEMARENQTTQKGQKNSRERMKRIEEGIKELGSQILKEHPVENTQLQNEKLYLYYLQNGRDMYVDQELDINRLSDYDVDHIVPQSFIKDDSIDNKVLTRSDKNRGKSDNVPSEEVVKKMKNYWRQLLNAKLITQRKFDNLTKAERGGLSELDKAGFIKRQLVETRQITKHVAQILDSRMNTKYDENDKLIREVKVITLKSKLVSDFRKDFQFYKVREINNYHHAHDAYLNAVVGTALIKKYPKLESEFVYGDYKVYDVRKMIAKSEQEIGKATAKRFFYSNIMNFFKTEITLANGEIRKRPLIETNEETGEIVWDKGRDFATVRKVLSMPQVNIVKKTEVQTGALTNESIYARGSFDKLISRKHRFESSKYGGFGSPTVTYSVLVVAKSKVQDGKVKKIKTGKELIGITLLDKLVFEKNPLKFIEDKGYGNVQIDKCIKLPKYSLFEFENGTRRMLASVMANNNSRGDLQKANEMFLPAKLVTLLYHAHKIESSKELEHEAYILDHYNDLYQLLSYIERFASLYVDVEKNISKVKELFSNIESYSISEICSSVINLLTLTASGAPADFKFLGTTIPRKRYGSPQSILSSTLIHQSITGLYETRIDLSQLGGD

SEQ ID NO: 660 - protein, 1371 aa, Streptococcus dysgalactiae
MDKKYSIGLDIGTNSVGWAVITDDYKVPSKKFKVLGNTDRHSIKKNLIGALLFDSGETAEATRLKRTARRRYTRRKNRIRYLQEIFSSEMSKVDDSFFHRLEESFLVEEDKKHERHPIFGNIVDEVAYHEKYPTIYHLRKKLADSTDKADLRLIYLALAHMIKFRGHFLIEGDLNPDNSDVDKLFIQLVQTYNQLFEEKPINASGVDAKAILSARLSKSKRLENLIAQLPGEKKNGLFGNLIALSLGLTPNFKSNFDLAEDAKLQLSKDTYDDDLDNLLAQIGNQYADLFLAAKNLSDAILLSDILRVNSEITKAPLSASMIKRYDEHHQDLTLLKALVRQQLPEKYKEIFFDQSKNGYAGYIDGGASQEEFYKFIKPILEKMDGTEELLAKLNREDLLRKQRTFDNGSIPHQIHLGELHAILRRQEDFYPFLKDNREKIEKILTFRIPYYVGPLARGNSRFAWMTRKSEETITPWNFEEVVDKGASAQSFIERMTNFDKNLPNEKVLPKHSLLYEYFTVYNELTKVKYVTEGMRKPEFLSGKQKEAIVDLLFKTNRKVTVKQLKEDYFKKIECFDSVEISGVEDRFNASLGTYHDLLKIIKDKDFLDNEENEDILEDIVLTLTLFEDKEMIEERLKKYANLFDDKVMKQLKRRHYTGWGRLSRKLINGIRDKQSGKTILDFLKSDGFANRNFMQLINDDSLTFKEAIQKAQVSGQGHSLHEQIANLAGSPAIKKGILQSVKVVDELVKVMGHKPENIVIEMARENQTTQKGQKNSRERMKRIEEGIKELGSQILKEHPVENTQLQNEKLYLYYLQNGRDMYVDQELDINRLSDYDVDHIVPQSFIKDDSIDNKVLTRSDKNRGKSDNVPSEEVVKKMKNYWRQLLNAKLITQRKFDNLTKAERGGLSELDKAGFIKRQLVETRQITKHVAQILDSRMNTKYDENDKLIREVKVITLKSKLVSDFRKDFQFYKVREINNYHHAHDAYLNAVVGTALIKKYPKLESEFVYGDYKVYDVRKMIAKSEQEIGKATAKRFFYSNIMNFFKTEITLANGEIRKRPLIETNEETGEIVWDKGRDFATVRKVLSMPQVNIVKKTEVQTGALTNESIYARGSFDKLISRKHRFESSKYGGFGSPTVTYSVLVVAKSKVQDGKVKKIKTGKELIGITLLDKLVFEKNPLKFIEDKGYGNVQIDKCIKLPKYSLFEFENGTRRMLASVMANNNSRGDLQKANEMFLPAKLVTLLYHAHKIESSKELEHEAYILDHYNDLYQLLSYIERFASLYVDVEKNISKVKELFSNIESYSISEICSSVINLLTLTASGAPADFKFLGTTIPRKRYGSPQSILSSTLIHQSITGLYETRIDLSQLGGD

SEQ ID NO: 661 - protein, 1370 aa, Streptococcus gallolyticus; identical to SEQ ID NO: 209

SEQ ID NO: 662 - protein, 1375 aa, Streptococcus infantarius
MEKSYSIGLDIGTNSVGWAVITDDYKVPAKKMKVLGNTDKKYIKKNLLGALLFDSGETAEVTRLKRTARRRYTRRKNRLRYLQEIFAKEMTKVDESFFQRLEESFLTDDDKTFDSHPIFGNKAEEDAYHQKFPTIYHLRKYLADSQEKADLRLVYLALAHMIKYRGHFLIEGELNAENTDVQKLFNVFVETYDKIVDESHLSEIEVDASSILTEKVSKSRRLENLIKQYPTEKKNTLFGNLIALALGLQPNFKTNFKLSEDAKLQFSKDTYEEDLEELLGKVGDDYADLFISAKNLYDAILLSGILTVDDNSTKAPLSASMIKRYVEHHEDLEKLKEFIKINKLKLYHDIFKDKTKNGYAGYIDNGVKQDEFYKYLKTILTKIDDSDYFLDKIERDDFLRKQRTFDNGSIPHQIHLQEMHSILRRQGDYYPFLKENQAKIEKILTFRIPYYVGPLARKDSRFAWANYHSDEPITPWNFDEVVDKEKSAEKFITRMTLNDLYLPEEKVLPKHSHVYETFTVYNELTKIKYVNEQGESFFFDANMKQEIFDHVFKENRKVTKAKLLSYLNNEFEEFRINDLIGLDKDSKSFNASLGTYHDLKKILDKSFLDDKTNGQIIEDIVLTLTLFEDRDMIHERLQKYSDFFTSQQLKKLERRHYTGWGRLSYKLINGIRNKENNKTILDFLIDDGHANRNFMQLINDESLSFKTIIQEAQVVGDVDDIEAVVHDLPGSPAIKKGILQSVKIVDELVKVMGDNPDNIVIEMARENQTTGYGRNKSNQRLKRLQDSLKEFGSDILSKKKPSYVDSKVENSHLQNDRLFLYYIQNGKDMYTGEELDIDRLSDYDIDHIIPQAFIKDNSIDNKVLTSSAKNRGKSDDVPSIEIVRNRRSYWYKLYKSGLISKRKFDNLTKAERGGLTEADKAGFIKRQLVETRQITKHVAQILDARFNTKRDENDKVIRDVKVITLKSNLVSQFRKEFKFYKVREINDYHHAHDAYLNAVVGTALLKKYPKLTPEFVYGEYKKYDVRKLIAKSSDDYSEMGKATAKYFFYSNLMNFFKTEVKYADGRVFERPDIETNADGEVVWNKQKDFDIVRKVLSYPQVNIVKKVEAQTGGFSKESILSKGDSDKLIPRKTKKVYWNTKKYGGFDSPTVAYSVLVVADIEKGKAKKLKTVKELVGISIMERSFFEENPVSFLEKKGYHNVQEDKLIKLPKYSLFEFEGGRRRLLASATELQKGNEVMLPAHLVELLYHAHRIDSFNSTEHLKYVSEHKKEFEKVLSCVENFSNLYVDVEKNLSKVRAAAESMTNFSLEEISASFINLLTLTALGAPADFNFLGEKIPRKRYTSTKECLSATLIHQSVTGLYETRIDLSKLGEE

SEQ ID NO: 663 - protein, 1368 aa, Streptococcus iniae
MRKPYSIGLDIGTNSVGWAVITDDYKVPSKKMRIQGTTDRTSIKKNLIGALLFDNGETAEATRLKRTTRRRYTRRKYRIKELQKIFSSEMNELDIAFFPRLSESFLVSDDKEFENHPIFGNLKDEITYHNDYPTIYHLRQTLADSDQKADLRLIYLALAHIIKFRGHFLIEGNLDSENTDVHVLFLNLVNIYNNLFEEDIVETASIDAEKILTSKTSKSRRLENLIAEIPNQKRNMLFGNLVSLALGLTPNFKTNFELLEDAKLQISKDSYEEDLDNLLAQIGDQYADLFIAAKKLSDAILLSDIITVKGASTKAPLSASMVQRYEEHQQDLALLKNLVKKQIPEKYKEIFDNKEKNGYAGYIDGKTSQEEFYKYIKPILLKLDGTEKLISKLEREDFLRKQRTFDNGSIPHQIHLNELKAIIRRQEKFYPFLKENQKKIEKLFTFKIPYYVGPLANGQSSFAWLKRQSNESITPWNFEEVVDQEASARAFIERMTNFDTYLPEEKVLPKHSPLYEMFMVYNELTKVKYQTEGMKRPVFLSSEDKEEIVNLLFKKERKVTVKQLKEEYFSKMKCFHTVTILGVEDRFNASLGTYHDLLKIFKDKAFLDDEANQDILEEIVWTLTLFEDQAMIERRLVKYADVFEKSVLKKLKKRHYTGWGRLSQKLINGIKDKQTGKTILGFLKDDGVANRNFMQLINDSSLDFAKIIKNEQEKTIKNESLEETIANLAGSPAIKKGILQSIKIVDEIVKIMGQNPDNIVIEMARENQSTMQGIKNSRQRLRKLEEVHKNTGSKILKEYNVSNTQLQSDRLYLYLLQDGKDMYTGKELDYDNLSQYDIDHIIPQSFIKDNSIDNTVLTTQASNRGKSDNVPNIETVNKMKSFWYKQLKSGAISQRKFDHLTKAERGALSDFDKAGFIKRQLVETRQITKHVAQILDSRFNSNLTEDSKSNRNVKIITLKSKMVSDFRKDFGFYKLREVNDYHHAQDAYLNAVVGTALLKKYPKLEAEFVYGDYKHYDLAKLMIQPDSSLGKATTRMFFYSNLMNFFKKEIKLADDTIFTRPQIEVNTETGEIVWDKVKDMQTIRKVMSYPQVNIVMKTEVQTGGFSKESIWPKGDSDKLIARKKSWDPKKYGGFDSPIIAYSVLVVAKIAKGKTQKLKTIKELVGIKIMEQDEFEKDPIAFLEKKGYQDIQTSSIIKLPKYSLFELENGRKRLLASAKELQKGNELALPNKYVKFLYLASHYTKFTGKEEDREKKRSYVESHLYYFDEIMQIIVEYSNRYILADSNLIKIQNLYKEKDNFSIEEQAINMLNLFTFTDLGAPSAFKFFNGDIDRKRYSSTNEIINSTLIYQSPTGLYETRIDLSKLGGK

SEQ ID NO: 664 - protein, 1392 aa, Streptococcus mitis
MNNNNYSIGLDIGTNSVGWAVITDDYKVPSKKMKVLGNTDKHFIKKNLIGALLFDEGATAEDRRFKRTARRRYTRRKNRLRYLQEIFSEEMSKVDSSFFHRLDDSFLVPEDKRGSKYPIFATLAEEKEYHKKFPTIYHLRKHLADSKEKTDLRLIYLALAHMIKYRGHFLYEESFDIKNNDIQKIFSEFISIYDNTFEGSSLSGQNAQVEAIFTDKISKSAKRERILKLFAYEKSTDLFSEFLKLIVGNQADFKKHFDLEEKAPLQFSKDTYDEDLENLLGQIGDDFADLFLVAKKLYDAILLSGILTVTDSSTKAPLSASMIERYENHQKDLAALKQFIQNNLQEKYDEVFSDQSKDGYARYINGKTTQEAFYKYIKNLLSKFEGSDYFLDKIEREDFLRKQRTFDNGSIPHQIHLQEMNAIIRRQGEHYPFLKEYKEKIETILTFRIPYYVGPLARGNRNFAWLTRNSDQAIRPWNFEEIVDQASSAEEFINKMTNYDLYLPEEKVLPKHSLLYETFAVYNELTKVKFISEGLRDYQFLDSGQKKQIVNQLFKEKRKVTEKDIIQYLHNVDGYDGIELKGIEKQFNASLSTYHDLLKIIKDKEFMDDPKNEEILENIVHTLTIFEDREMIKQRLAQYASIFDKKVIKALTRRHYTGWGKLSAKLINGICDKKTGKTILDYLIDDGYSNRNFMQLINDDGLSFKDIIQKAQVVGKTNDVKQVVQELPGSPAIKKGILQSIKLVDELVKVMGHAPESIVIEIARENQTTARGKKNSQQRYKRIEDALKNLAPGLDSNILKEHPTDNIQLQNDRLFLYYLQNGKDMYTGEALDINQLSSYDIDHIVPQAFIKDDSLDNRVLTSSKDNRGKSDNVPSLEVVQKRKAFWQQLLDSKLISEHKFNNLTKAERGGLDERDKVGFIRRQLVETRQITKHVAQILDARFNTEVNEKDKKNRTVKIITLKSNLVSNFRKEFKLYKVREINDYHHAHDAYLNAVVAKAILKKYPKLEPGFVYGDYQKYDIKRYISRSKDPKEVEKATEKYFFYSNLLNFFKEEVHYADGTIVKRENIEYSKDTGEIAWNKEKDFATIKKVLSLPQVNIVKKTEIQTHGLDRGKPRGLFNSNPSPKPSEDRKENLVPIKQGLDPRKYGGYAGISNSYAVLVKAIIEKGAKKQQKTVLEFQGISILDKINFEKNKENYLLEKGYIKILSTITLPKYSLFEFPDGTRRRLASILSTNNKRGEIHKGNELVIPEKYTTLLYHAKNINKTLEPEHLEYVEKHRNDFAKLLEYVLNFNDKYVGALKNGERIRQAFIDWETVDIEKLCFSFIGPRNSKNAGLFELTSQGSASDFEFLGVKIPRYRDYTPSSLLNATLIHQSITGLYETRIDLSKLGED

SEQ ID NO: 665 - protein, 1134 aa, Streptococcus mutans
MANGKILGLDIGIASVGVGIIDKETGKIIHVNSRIFPAATADSNVERRGFRQGRRLVRRKKHRKVRLADLFLDSNLLTDFSKVSLNLNPYQLRVKGLNEELSNEELFIALKSIVSRRGISYLDDASEDSGANSSEYGKAVEENRKLLEDRTPGQIQLERFEKYGKVRGDFTVVENGENHRLINVFSTSAYKKEAERILRRQQEFNMRIADEFIEAYLTILTGKRKYYHGPGNEKSRTDYGRFRTDGTTLDNIFGILIGKCTFYPDEYRAAKASYTAQEFNLLNDLNNLTVPTETKKLSEEQKRQIIEHAKTVKTLGAPTLLKYIVKLVGCSADDIKGYRIDKSDKPEIHTFEAYRKMRTMELIKVDDLSRESLDALAHILTLNTEREGIEEAIRDRFTNKEFNQEQINELVLFRKNNSSLFGKGWHNFSLKLMKELIPELYETSEEQMTILTRLGKQRVKKSSNRTNYIDEKELTEEIYNPVVAKSVRQAIKIINLATKKYGVFDNIVIEMARESNEDDEKKAIQNAQKANEDEKKAALLKAAHQFNGKEELPDSIFHGHKELLTKIRLWHQQGEKCLYTGKTIFINDLIHNPYKYEIDHILPLSLSFDDSLANKVLVLSTANQEKGQRTPFQSLDSMDGAWTYREFKSYVKGLKTLSNKKKDYLLTEENIDKIEVKQKFIERNLVDTRYSSRVVLNALQDFYKERKFDTKISVVRGQFTSQLRRKWRIEKTRETYHHHAVDALIIAASSQLNLWKKQNNPLISYKEDQFVDPETGEILSLSDDEYKKLVFKAPYEHFVDTLKSKKFEDSILFSYQVDSKYNRKISGATICGTRKAQLGKDTQEETYVLGKIKDIYSQKGYEDFIKKYKKDKTQFLMYHKDPQTFEKVIEEILKTYPDKELNEKGKEVSCNPFEKYRQENGPVRKYSKKGNGPEIKSLKYYDEVLGKNIDITPKNSLNKVVLRSLNPWRTDVYFNHETRKYEFLGLKYSDLRYLKGEHRYGILIGDYKKIKDKEGIEKESEFKFTLYKNDLILIKDTAKGKEELFRFWSRTGKDNAKTFEKNKIELKPYSKSQFEKGEDTNVLGKLYASSNQLQKSFGTLENLSIYKVRTDVLGNKYFIKKEGDKPQLNFKKKL

SEQ ID NO: 666 - protein, 1134 aa, Streptococcus mutans; identical to SEQ ID NO: 665

SEQ ID NO: 667 - protein, 1128 aa, Streptococcus mutans
MANSKILGLDIGIASVGVGIIDKETGKIIHVNSRIFPAATADSNVERRGFRQGRRLVRRKKHRKVRLADLFLDSNLLTDFSKVSLNLNPYQLRVKGLNEELSNEELFIALKSIVSRRGISYLDDASEDSGANSSEYGKAVEENRKLLEDRTPGQIQLERFEKYGKVRGDFTVVENGENHRLINVFSTSAYKKEAERILRRQQEFNIRIADEFIEAYLTILTGKRKYYHGPGNEKSRTDYGRFRTDGTTLDNIFGILIGKCTFYPDEYRAAKASYTAQEFNLLNDLNNLTVPTETKKLSEEQKRQIIEHAKTVKTLGAPTLLKYIAKLVGCSADDIKGYRIDKSDKPEIHTFEAYRKMRTMELIKVADLSRESLDALAHILTLNTEREGIEEAIRDRFTNKEFNQEQINELVLFRKNNSSLFGKGWHNFSLKLMKELIPELYETSEEQMTILTRLGKQRVKKSSNRTNYIDEKELTEEIYNPVVAKSVRQAIKIINLATKKYGVFDNIVIEMARESNEDDEKKAIQNAQKANEDEKEAALLKAAHQFNGKEELPDSIFHGHKELLTKIRLWHQQGEKCLYTGKTIFINDLIHNPYKYEIDHILPLSLSFDDSLANKVLVLSTANQEKGQRTPFQSLDSMDGAWTYREFKAYVKGLKTLSNKKKDYLLNEEDINKNEVKQKFIERNLVDTRYSSRVVLNTLQDFYKKREFDTKISVVRGQFTSQIRRKWRIEKTRETYHHHAVDALIIAASSQLNLWKKQNNPLISYKEDQFVDPETGEILSLSDDEYKELVFKAPYDHFVDTLKSKKFEDSILFSYQVDSKYNRKISDATIYGTRKARLGKDSQEETYVLGKIKDIYSQKGYEDFIKKYKKDKTQFLMYHKDPQTFEKVIEEILKTYSDKELNEKGKEVPCNPFEKYRQENGPVRKYSKKGNGPEIKSIKYYDNKLGNHIDITPNNSHHQVVLQSLKPWRTDVYFNPKSGKYELMGLKYSDLRFEKVSGDYGISVKKYNEIKSKEGVDENSEFKFTLYKNDLILIKDTESGEQELFRFLSRTMPNQKHYVELKPYDKSKFEGHQKLMDIFGEVAKGGQCLKGLNKSNISIYKVKTDVLGNKYFIKKEGDQPQLNFKKKI

SEQ ID NO: 668 - protein, 1128 aa, Streptococcus mutans; identical to SEQ ID NO: 667

SEQ ID NO: 669 - protein, 1338 aa, Streptococcus mutans
MDLIGTNSVGWAVVTDDYKVPAKKMKVLGNTDKSHIKKNLLGALLFDSGNTAADRRLKRTARRRYTRRRNRILYLQEIFAEEMSKVDDSFFHRLEDSFLVTEDKRGERHPIFGNLEEEVKYHENFPTIYHLRQYLADNPEKVDLRLVYLALAHIIKFRGHFLIEGKFDTRNNDVQRLFQEFLAVYDNTFENSSLQEQNVQVEEILTDKISKSAKKDRVLKLFPNEKSNGRFAEFLKLIVGNQADFKKHFELEEKAPLQFSKDTYEEELEVLLAQIGDNYAELFLSAKKLYDSILLSGILTVTDVSTKAPLSASMIQRYNEHQMDLAQLKQFIRQKLSDKYNEVFSDVSKDGYAGYIDGKTNQEAFYKYLKGLLNKIEGSGYFLDKIEREDFLRKQRTFDNGSIPHQIHLQEMRAIIRRQAEFYPFLADNQDRIEKILTFRIPYYVGPLARGKSDFAWLSRKSADKITPWNFDEIVDKESSAEAFINRMTNYDLYLPNQKVLPKHSLLYEKFTVYNELTKVKYKTEQGKTAFFDANMKQEIFDGVFKVYRKVTKDKLMDFLEKEFDEFRIVDLTGLDKENKAFNASYGTYHDLRKILDKDFLDNSKNEKILEDIVLTLTLFEDREMIRKRLENYSDLLTKEQVKKLERRHYTGWGRLSAELIHGIRNKESRKTILDYLIDDGNSNRNFMQLINDDALSFKEEIAKAQVIGETDNLNQVVSDIAGSPAIKKGILQSLKIVDELVKIMGHQPENIVVEMARENQFTNQGRRNSQQRLKGLTDSIKEFGSQILKEHPVEHSQLQNDRLFLYYLQNGRDMYTGEELDIDYLSQYDIDHIIPQAFIKDNSIDNRVLTSSKENRGKSDDVPSKNVVRKMKSYWSKLLSAKLITQRKFDNLTKAERGGLTDDDKAGFIKRQLVETRQITKHVARILDERFHTETDENNKKIRQVKIVTLKSNLVSNFRKEFELYKVREINDYHHAHDAYLNAVIGKALLGVYPQLEPEFVYGDYPHFHGHKENKATAKKFFYSNIMNFFKKDDVRTDKNGEIIWKKDEHISNIKKVLSYPQVNIVKKVEEQTGGFSKESILPKGNSDKLIPRKTKKFYWDTKKYGGFDSPIVAYSILVIADIEKGKSKKLKTVKALVGVTIMEKMTFERDPVAFLERKGYRNVQEENIIKLPKYSLFKLENGRKRLLASARELQKGNEIVLPNHLGTLLYHAKNIHKVDEPKHLDYVDKHKDEFKELLDVVSNFSKKYTLAEGNLEKIKELYAQNNGEDLKELASSFINLLTFTAIGAPATFKFFDKNIDRKRYTSTTEILNATLIHQSITGLYETRIDLSKLGGD

SEQ ID NO: 670 - protein, 1338 aa, Streptococcus mutans; identical to SEQ ID NO: 669

SEQ ID NO: 671 - protein, 1345 aa, Streptococcus mutans
MKKPYSIGLDIGTNSVGWAVVTDDYKVPAKKMKVLGNTDKSHIEKNLLGALLFDSGNTAEDRRLKRTARRRYTRRRNRILYLQEIFSEEMGKVDDSFFHRLEDFFLVTEDKRGERHPIFGNLEEEVKYHENFPTIYHLRQYLADNPEKVDLRLVYLALAHIIKFRGHFLIEGKFDTRNNDVQRLFQEFLAVYDNTFENSSLQEQNVQVEEILTDKISKSAKKDRVLKLFPNEKSNGRFAEFLKLIVGNQADFKKHFELEEKAPLQFSKDTYEEELEVLLAQIGDNYAELFLSAKKLYDSILLSGILTADDSSTKAPLSASMIQRYNEHQMDLAQLKQFIRQKLSDKYNEVFSDVSKDGYAGYIDGKTNQEAFYKYLKGLLNKIEGSGYFLDKIEREDFLRKQRTFDNGSIPHQIHLQEMRAIIRRQSEFYPFLADNQDRIEKILTFRIPYYVGPLARGKSDFAWLSRKSADKITPWNFDEIVDKESSAEAFINRMTNYDLYLPNQKVLPKHSLLYEKFTVYNELTKVKYKTEQGETAFFDANMKQEIFDGVFKVYRKVTKDKLMDFLEKEFDEFRIVDLTGLDKENKAFNASYGTYHDLRKILDKDFLDNSKNEKILEDIVLTLTLFEDREMIRKRLKNYSDLLTKEQLKKLERRHYTGWGRLSAELIHGIRNKESRKTILDYLIDDGNSNRNFMQLINDDALSFKEEIAKAQVIGETDNLNQVVSDIAGSPAIKKGILQSLKIVDELVKIMGHQPENIVVEMARENQFTNQGRRNSQQRLKGLTDSIKEFGSQILKEHPVENSQLQNDRLFLYYLQNGRDMYTGEELDIDYLSQYDIDHIIPQAFIKDNSIDNRVLTSSKENRGKSDDVPSKDVVRKMKPYWSKLLSAKLITQRKFDNLTKAERGGLTDDDKAGFIKRQLVETRQITKHVARILDERFNTETDENNKKIRQVKIVTLKSNLVSNFRKEFELYKVREINDYHHAHDAYLNAVIGKALLGVYPQLEPEFVYGDYPHFHGHEENKATAKKFFYSNIMNFFKKDDVRTDKNGEIIWKKDEHISNIKKVLSYPQVNIVKKVEEQTGGFSKESILPKGNSDKLIPRKTKKFYWDTKKYGGFDSPIVAYSILVIADIEKGKSKKLKTVKALVGVTIMEKMTFERDPVAFLERKGYRNVQEENIIKLPKYSLFKLENGRKRLLASARELQKGNEIVLPNHLGTLLYHAKNIHKVDEPKHLDYVDKHKDEFKELLDVVSNFSKKYTLAEGNLEKIKELYAQNNGEDLKELASSFINLLTFTAIGAPATFKFFDKNIDRKRYTSTTEILNATLIHQSITGLYETRIDLSKLGGD

SEQ ID NO: 672 - protein, 1345 aa, Streptococcus mutans; identical to SEQ ID NO: 671

SEQ ID NO: 673 - protein, 1229 aa, Streptococcus mutans
MKKPYSIGLDIGTNSVGWAVVTDDYKVPAKKMKVLGNTDKSHIEKNLLGALLFDSGNTAEDRRLKRTARRRYTRRRNRILYLQEIFSEEMGKVDDSFFHRLEDSFLVTEDKRGERHPIFGNLEEEVKYHENFPTIYHLRQYLADNPEKVDLRLVYLALAHIIKFRGHFLIEGKFDTRNNDVQRLFQEFLAVYDNTFENSSLQEQNIQVEEILTDKISKSAKKDRVLKLFPNEKSNGRFAEFLKLIVGNQADFKKHFELEEKAPLQFSKDTYEEELEVLLAQIGDNYAELFLSAKKLYDSILLSGILTVTDVGTKAPLSASMIQRYNEHQMDLTQLKQFIRQKLSDKYNEVFSDVSKDGYAGYIDGKTNQEAFYKYLKGLLNKIEGSGYFLDKIEREDFLRKQRTFDNGSIPHQIHLQEMRAIIRRQAEFYPFLADNQDRIEKILTFRIPYYVGPLARGKSDFAWLSRKSADKITPWNFDEIVDKESSAEAFINRMTNYDLYLPNQKVLPKHSLLYEKFTVYNELTKVKYKTEQGKTAFFDANMKQEIFDGVFKVYRKVTKDKLMDFLEKEFDEFRIVDLTGLDKENKVFNASYGTYHDLCKILDKDFLDNSKNEKILEDIVLTLTLFEDREMIRKRLENYSDLLTKEQVKKLERRHYTGWGRLSAELIHGIRNKESRKTILDYLIDDGNSNRNFMQLINDDALSFKEEIAKAQVIGETDNLNQVVSDIAGSPAIKKGILQSLKIVDELVKIMGHQPENIVVEMARENQFTNQGRRNSQQRLKGLTDSIKEFGSQILKEHPVENSQLQNDRLFLYYLQNGRDMYTGEELDIDYLSQYDIDHIIPQAFIKDNSIDNRVLTSSKENRGKSDDVPSKDVVRKMKPYWSKLLSAKLITQRKFDNLTKAERGGLTDDDKAGFIKRQLVETRQITKHVARILDERFNTETDENNKKIRQVKIVTLKSNLVSNFRKEFELYKVREINDYHHAHDAYLNAVIGKALLGVYPQLEPEFVYGDYPHFHGHEENKATAKKFFYSNIMNFFKKDDVRTDKNGEIIWKKDEHISNIKKVLSYPQVNIVKKVEEQTIGQNGGLFDDNPKSPLEVIPSKLVPLKKALNPEKYGGYQKPTTAYPILLIVDTKQLIPISVMDKKRFEQNPVKFLKDKGYQQIEKNNFVKLPKYTLVDIGNGIKRLWASSKEVHKGNQLVVSKKSQDLLYHAHHLDNDYSNEYVKNHY

SEQ ID NO: 674 - protein, 1229 aa, Streptococcus mutans; identical to SEQ ID NO: 673

SEQ ID NO: 675 - protein, 1345 aa, Streptococcus mutans
MKKPYSIGLDIGTNSVGWAVVTDDYKVPAKKMKVLGNTDKSHIEKNLLGALLFDSGNTAEDRRLKRTARRRYTRRRNRILYLQEIFSEEMGKVDDSFFHRLEDSFLVTEDKRGERHPIFGNLEEEVKYHENFPTIYHLRQYLADNPEKVDLRLVYLALAHIIKFRGHFLIEGKFDTRNNDVQRLFQEFLAVYDNTFENSSLQEQNVQVEEILTDKISKSAKKDRVLKLFPNEKSNGRFAEFLKLIVGNQADFKKHFELEEKAPLQFSKDTYEEELEVLLAQIGDNYAELFLSAKKLYDSILLSGILTVTDVGTKAPLSASMIQRYNEHQMDLAQLKQFIRQKLSDKYNEVFSDVSKDGYAGYIDGKTNQEAFYKYLKGLLNKIEGSGYFLDKIEREDFLRKQRTFDNGSIPHQIHLQEMRAIIRRQAEFYPFLADNQDRIEKLLTFRIPYYVGPLARGKSDFAWLSRKSADKITPWNFDEIVDKESSAEAFINRMTNYDLYLPNQKVLPKHSLLYEKFTVYNELIKVKYKTEQGKTAFFDANMKQEIFDGVFKVYRKVTKDKLMDFLEKEFDEFRIVDLTGLDKENKVFNASYGTYHDLCKILDKDFLDNSKNEKILEDIVLTLTLFEDREMIRKRLENYSDLLTKEQVKKLERRHYTGWGRLSAELIHGIRNKESRKTILDYLIDDGNSNRNFMQLINDDALSFKEEIAKAQVIGETDNLNQVVSDIAGSPAIKKGILQSLKIVDELVKIMGHQPENIVVEMARENQFTNQGRRNSQQRLKGLTDSIKEFGSQILKEHPVENSQLQNDRLFLYYLQNGRDMYTGEELDIDYLSQYDIDHIIPQAFIKDNSIDNRVLTSSKENRGKSDDVPSKDVVRKMKSYWSKLLSAKLITQRKFDNLTKAERGGLTDDDKAGFIKRQLVETRQITKHVARILDERFNTETDENNKKIRQVKIVTLKSNLVSNFRKEFELYKVREINDYHHAHDAYLNAVIGKALLGVYPQLEPEFVYGDYPHFHGHKENKATAKKFFYSNIMNFFKKDDVRTDKNGEIIWKKDEHISNIKKVLSYPQVNIVKKVEEQTGGFSKESILPKGNSDKLIPRKTKKFYWDTKKYGGFDSPIVAYSILVIADIEKGKSKKLKTVKALVGVTIMEKMTFERDPVAFLERKGYRNVQEENIIKLPKYSLFKLENGRKRLLASARELQKGNEIVLPNHLGTLLYHAKNIHKVDEPKHLDYVDKHKDEFKELLDVVSNFSKKYTLAEGNLEKIKELYAQNNGEDLKELASSFINLLTFTAIGAPATFKFFDKNIDRKRYTSTTEILNATLIHQSITGLYETRIDLNKLGGD

SEQ ID NO: 676 - protein, 1350 aa, Streptococcus mutans
MKKPYSIGLDIGTNSVGWAVVTDDYKVPAKKMKVLGNTDKSHIEKNLLGALLFDSGNTAEDRRLKRTARRRYTRRRNRILYLQEIFSEEMGKVDDSFFHRLEDSFLVTEDKRGERHPIFGNLEEEVKYHENFPTIYHLRQYLADNPEKVDLRLVYLALAHIIKFRGHFLIEGKFDTRNNDVQRLFQEFLAVYDNTFENSSLQEQNVQVEEILTDKISKSAKKDRVLKLFPNEKSNGRFAEFLKLIVGNQADFKKHFELEEKAPLQFSKDTYEEELEVLLAQIGDNYAELFLSAKKLYDSILLSGILTVTDVSTKAPLSASMIQRYNEHQMDLTQLKQFIRQKLSDKYNEVFSDVSKDGYAGYIDGKTNQEAFYKYLKGLLNKIEGSGYFLDKIEREDFLRKQRTFDNGSIPHQIHLQEMRAIIRRQAEFYSFLADNQDRIEKILTFRIPYYVGPLARGKSDFAWLSRKSADKITPWNFDEIVDKESSAEAFINRMTNYDLYLPNQKVLPKHSLLYEKFTVYNELTKVKYKTEQGKTAFFDANMKQEIFDGVFKVYRKVTKDKLMDFLEKEFDEFRIVDLTGLDKENKAFNASYGTYHDLRKILDKDFLDNSKNEKILEDIVLTLTLFEDREMIRKRLENYSDLLTKEQVKKLERRHYTGWGRLSAELIHGIRNKESRKTILDYLIDDGNSNRNFMQLINDDALSFKEEIAKAQVIGETDNLNQVVSDIAGSPAIKKGILQSLKIVDELVKIMGHQPENIVVEMARENQFTNQGRRNSQQRLKGLTDSIKEFGSQILKEHPVENSQLQNDRLFLYYLQNGRDMYTGEELDIDYLSQYDIDHIIPQAFIKDNSIDNRVLTSSKENRGKSDDVPSEDVVNRMRPFWNKLLSSGLISQRKYNNLTKKELTLDDKAGFIKRQLVETRQITKHVARMLDERFNKEFDDNNKRIRKVKIVTLKSNLVSSFRKEFELYKVREINDYHHAHDAYLNAVVVKALLVKYSKLEPEFVYGEYPKYNSYRERKTATQKMFFYSNIMNMFKSKVKLADDQIVERPMIEVNDETGEIAWDKTKHITTVKKVLSYPQVNIVKKVEEQTIGQNGGLFDDNPKSPLEVIPSKLVPLKKALNPEKYGGYQKPTTAYPILLIVDTKQLIPISVMDKKRFEQNPVKFLKDKGYQQIEKNNFVKLPKYTLVDIGNGIKRLWASSKEVHKGNQLVVSKKSQDLLYHAHHLDNDYSNEYVKNHYQQFDILFNEITSFSKKCKLGKEHIQKIEEAYSKERDSASIEELADGFIKLLGFTQLGATSPFSFLGIKLNQKQYTGKKDYLLPCMEATLIHQSITGLYETRIDLSKLGGD

SEQ ID NO: 677 - protein, 1350 aa, Streptococcus mutans
MKKPYSIGLDIGTNSVGWAVVTDDYKVPAKKMKVLGNTDKSHIEKNLLGALLFDSGNTAEDRRLKRTARRRYTRRRNRILYLQEIFSEEMGKVDDSFFHRLEDSFLVTEDKRGERHPIFGNLEEEVKYHENFPTIYHLRQYLADNPEKVDLRLVYLALAHIIKFRGHFLIEGKFDTRNNDVQRLFQEFLAVYDNTFENSSLQEQNVQVEEILTDKISKSAKKDRVLKLFPNEKSNGRFAEFLKLIVGNQADFKKHFELEEKAPLQFSKDTYEEELEVLLAQIGDNYAELFLSAKKLYDSILLSGILTVTDVSTKAPLSASMIQRYNEHQMDLTQLKQFIRQKLSDKYNEVFSDVSKDGYAGYIDGKTNQEAFYKYLKGLLNKIEGSGYFLDKIEREDFLRKQRTFDNGSIPHQIHLQEMRAIIRRQAEFYPFLADNQDRIEKILTFRIPYYVGPLARGKSDFAWLSRKSADKITPWNFDEIVDKESSAEAFINRMTNYDLYLPNQKVLPKHSLLYEKFTVYNELTKVKYKTEQGKTAFFDANMKQEIFDGVFKVYRKVTKDKLMDFLEKEFDEFRIVDLTGLDKENKAFNASYGTYHDLRKILDKDFLDNSKNEKILEDIVLTLTLFEDREMIRKRLKNYSDLLTKEQLKKLERRHYTGWGRLSAELIHGIRNKESRKTILDYLIDDGNSNRNFMQLINDDALSFKEEIAKAQVIGETDNLNQVVSDIAGSPAIKKGILQSLKIVDELVKIMGHQPENIVVEMARENQFTNQGRQNSQQRLKGLTDSIKEFGSQILKEHPVENSQLQNDRLFLYYLQNGRDMYTGEELDIDYLSQYDIDHIIPQAFIKDNSIDNRVLTSSKENRGKSDDVPSEDVVNRMRPFWNKLLSSGLISQRKYNNLTKKELTLDDKAGFIKRQLVETRQITKHVARMLDERFNKEFDDNNKRICKVKIVTLKSNLVSSFRKEFELYKVREINDYHHAHDAYLNAVVVKALLVKYSKLEPEFVYGEYPKYNSYRERKTATQKMFFYSNIMNMFKSKVKLADDQIVERPMIEVNDETGEIAWDKTKHITTVKKVLSYPQVNIVKKVEEQTIGQNGGLFDDNPKSPLEVIPSKLVPLKKALNPEKYGGYQKPTTAYPILLIVDTKQLIPISVMDKKRFEQNPVKFLKDKGYQQIEKNNFVKLPKYTLVDIGNGIKRLWASSKEVHKGNQLVVSKKSQDLLYHAHHLDNDYSNEYVKNHYQQFDILFNEITSFSKKCKLGKEHIQKIEEAYSKERDSASIEELADGFIKLLGFTQLGATSPFSFLGIKLNQKQYTGKKDYLLPCMEATLIHQSITGLYETRIDLSKLGGD

SEQ ID NO: 678 - protein, 1345 aa, Streptococcus mutans; identical to SEQ ID NO: 675

SEQ ID NO: 679 - protein, 1350 aa, Streptococcus mutans; identical to SEQ ID NO: 676

SEQ ID NO: 680 - protein, 1350 aa, Streptococcus mutans; identical to SEQ ID NO: 677

SEQ ID NO: 681 - protein, 1345 aa, Streptococcus mutans
MKKPYSIGLDIGTNSVGWAVVTDDYKVPAKKMKVLGNTDKSHIKKNLLGALLFDSGNTAADRRLKRTARRRYTRRRNRILYLQEIFAEEMSKVDDSFFHRLEDSFLVTEDKRGERHPIFGNLEEEVKYHENFPTIYHLRQYLADNPEKVDLRLVYLALAHIIKFRGHFLIEGKFDTRNNDVQRLFQEFLAVYDNTFENSSLQEQNVQVEEILTDKISKSAKKDRVLKLFPNEKSNGRFAEFLKLIVGNQADFKKHFELEEKAPLQFSKDTYEEELEVLLTQIGDNYAELFLSAKKLYDSILLSGILTVTDVSTKAPLSASMIQRYNEHQMDLAQLKQFIRQKLSDKYNEVFSDVSKDGYAGYIDGKTNQEAFYKYLKGLLNKIEGSGYFLDKIEREDFLRKQRTFDNGSIPHQIHLQEMRAIIRRQAEFYPFLADNQDRIEKILTFRIPYYVGPLARGKSDFAWLSRKSADKITPWNFDEIVDKESSAEAFINRMTNYDLYLPNQKVLPKHSLLYEKFTVYNELTKVKYKTEQGKTAFFDANMKQEIFDGVFKVYRKVTKDKLMDFLEKEFDEFRIVDLTGLDKENKAFNASYGTYHDLRKILDKDFLDNSKNEKILEDIVLTLTLFEDREMIRKRLENYSDLLTKEQVKKLERRHYTGWGRLSAELIHGIRNKESRKTLLDYLIDDGNSNRNFMQLINDDALSFKEEIAKAQVIGETDNLNQVVSDIAGSPAIKKGILQSLKIVDELVKIMGHQPENIVVEMARENQFTNQGRRNSQQRLKGLTDSIKEFGSQILKEHPVENSQLQNDRLFLYYLQNGRDMYTGEELDIDYLSQYDIDHIIPQAFIKDNSIDNRVLTSSKENRGKSDDVPSKDVVRKMKPYWSKLLSAKLITQRKFDNLTKAERGGLTDDDKAGFIKRQLVETRQITKHVARILDERFNTETDENNKKIRQVKIVTLKSNLVSNFRKEFELYKVREINDYHHAHDAYLNAVIGKALLGVYPQLEPEFVYGDYPHFHGHEENKATAKKFFYSNIMNFFKKDDVRTDKNGEIIWKKDEHISNIKKVLSYPQVNIVKKVEEQTGGFSKESILPKGNSDKLIPRKTKKFYWDTKKYGGFDSPIVAYSILVIADIEKGKSKKLKTVKALVGVTIMEKMTFERDPVAFLERKGYRNVQEENIIKLPKYSLFKLENGRKRLLASARELQKGNEIVLPNHLGTLLYHAKNIHKVDEPKHLDYVDKHKDEFKELLDVVSNFSKKYTLAEGNLEKIKELYAQNNGEDLKELSSSFINLLTFTAIGAPAAFKFFDKNIDRKRYTSTTEILNATLIHQSITGLYETRIDLSKLGGD

SEQ ID NO: 682 - protein, 1345 aa, Streptococcus mutans
MKKPYSIGLDIGTNSVGWAVVTDDYKVPAKKMKVLGNTDKSHIKKNLLGALLFDSGNTAADRRLKRTARRRYTRRRNRILYLQEIFAEEMSKVDDSFFHRLEDSFLVTEDKRGERHPIFGNLEEEVKYHENFPTIYHLRQYLADNPEKVDLRLVYLALAHIIKFRGHFLIEGKFDTRNNDVQRLFQEFLAVYDNTFENSSLQEQNVQVEEILTDKISKSAKKDRVLKLFPNEKSNGRFAEFLKLIVGNQADFKKHFELEEKAPLQFSKDTYEEELEVLLAQIGDNYAELFLSAKKLYDSILLSGILTVTDVSTKAPLSASMIQRYNEHQMDLAQLKQFIRQKLSDKYNEVFSDVSKDGYAGYIDGKTNQEAFYKYLKGLLNKIEGSGYFLDKIEREDFLRKQRTFDNGSIPHQIHLQEMRAIIRRQAEFYPFLADNQDRIEKILTFRIPYYVGPLARGKSDFAWLSRKSADKITPWNFDEIVDKESSAEAFINRMTNYDLYLPNQKVLPKHSLLYEKFTVYNELTKVKYKTEQGKTAFFDANMKQEIFDGVFKVYRKVTKDKLMDFLEKEFDEFRIVDLTGLDKENKAFNASYGTYHDLRKILDKDFLDNSKNEKILEDIVLTLTLFEDREMIRKRLENYSDLLTKEQVKKLERRHYTGWGRLSAELIHGIRNKESRKTILDYLIDDGNSNRNFMQLINDDALSFKEEIAKAQVIGETDNLNQVVSDIAGSPAIKKGILQSLKIVDELVKIMGHQPENIVVEMARENQFTNQGRRNSQQRLKGLTDSIKEFGSQILKEHPVEHSQLQNDRLFLYYLQNGRDMYTGEELDIDYLSQYDIDHIIPQAFIKDNSIDNRVLTSSKENRGKSDDVPSKNVVRKMKSYWSKLLSAKLITQRKFDNLTKAERGGLTDDDKAGFIKRQLVETRQITKHVARILDERFHTETDENNKKIRQVKIVTLKSNLVSNFRKEFELYKVREINDYHHAHDAYLNAVIGKALLGVYPQLEPEFVYGDYPHFHGHKENKATAKKFFYSNIMNFFKKDDVRTDKNGEIIWKKDEHISNIKKVLSYPQVNIVKKVEEQTGGFSKESILPKGNSDKLIPRKTKKFYWDTKKYGGFDSPIVAYSILVIADIEKGKSKKLKTVKALVGVTIMEKMTFERDPVAFLERKGYRNVQEENIIKLPKYSLFKLENGRKRLLASARELQKGNEIVLPNHLGTLLYHAKNIHKVDEPKHLDYVDKHKDEFKELLDVVSNFSKKYTLAEGNLEKIKELYAQNNGEDLKELASSFINLLTFTAIGAPATFKFFDKNIDRKRYTSTTEILNATLIHQSITGLYETRIDLSKLGGD

SEQ ID NO: 683 - protein, 1345 aa, Streptococcus mutans
MKKPYSIGLDIGTNSVGWAVVTDDYKVPAKKMKVLGNTDKSHIKKNLLGALLFDSGNTAADRRLKRTARRRYTRRRNRILYLQEIFAEEMSKVDDSFFHRLEDSFLVTEDKRGERHPIFGNLEEEVKYHENFPTIYHLRQYLADNPEKVDLRLVYLALAHIIKFRGHFLIEGKFDTRNNDVQRLFQEFLAVYDNTFENSSLQEQNVQVEEILTDKISKSAKKDRVLKLFPNEKSNGRFAEFLKLIVGNQADFKKHFELEEKAPLQFSKDTYEEELEVLLAQIGDNYAELFLSAKKLYDSILLSGILTVTDVSTKAPLSASMIQRYNEHQMDLAQLKQFIRQKLSDKYNEVFSDVSKDGYAGYIDGKTNQEAFYKYLKGLLNKIEGSGYFLDKIEREDFLRKQRTFDNGSIPHQIHLQEMRAIIRRQAEFYPFLADNQDRIEKILTFRIPYYVGPLARGKSDFAWLSRKSADKITPWNFDEIVDKESSAEAFINRMTNYDLYLPNQKVLPKHSLLYEKFTVYNELTKVKYKTEQGKTAFFDANMKQEIFDGVFKVYRKVTKDKLMDFLEKEFDEFRIVDLTGLDKENKVFNASYGTYHDLCKILDKDFLDNSKNEKILEDIVLTLTLFEDREMIRKRLENYSDLLTKEQVKKLERRHYTGWGRLSAELIHGIRNKESRKTILDYLIDDGNSNRNFMQLINDDALSFKEEIAKAQVIGETDNLNQVVSDIAGSPAIKKGILQSLKIVDELVKIMGHQPENIVVEMARENQFTKQGRRNSQQRLKGLTDSIKEFGSQILKEHPVENSQLQNDRLFLYYLQNGRDMYTGEELDIDYLSQYDIDHIIPQAFIKDNSIDNRVLTSSKENRGKSDDVPSKDVVRKMKSYWSKLLSAKLITQRKFDNLTKAERGGLTDDDKAGFIKRQLVETRQITKHVARILDERFYTETDENNKKIRQVKIVTLKSNLVSNFRKEFELYKVREINDYHHAHDAYLNAVIGKALLGVYPQLEPEFVYGDYPHFHGHKENKATAKKFFYSNIMNFFKKDDVRTDKNGEIIWKKDEHISNIKKVLSYPQVNIVKKVEEQTGGFSKESILPKGNSDKLIPRKTKKFYWDTKKYGGFDSPIVAYSILVIADIEKGKSKKLKTVKALVGVTIMEKMTFERDPVAFLERKGYRNVQEENIIKLPKYSLFKLENGRKRLLASARELQKGNEIVLPNHLGTLLYHAKNIHKVDEPKHLDYVDKHKDEFKELLDVVSNFSKKYTLAEGNLEKIKELYAQNNGEDLKELASSFINLLTFTAIGAPATFKFFDKNIDRKRYTSTTEILNATLIHQSITGLYETRIDLSKLGGD

SEQ ID NO: 684 - protein, 1345 aa, Streptococcus mutans
MKKPYSIGLDIGTNSVGWAVVTDDYKVPAKKMKVLGNTDKSHIKKNLLGALLFDSGNTAADRRLKRTARRRYTRRRNRILYLQEIFAEEMSKVDDSFFHRLEDSFLVTEDKRGERHPIFGNLEEEVKYHENFPTIYHLRQYLADNPEKVDLRLVYLALAHIIKFRGHFLIEGKFDTRNNDVQRLFQEFLAVYDNTFENSSLQEQNVQVEEILTDKISKSAKKDRVLKLFPNEKSNGRFAEFLKLIVGNQADFKKHFELEEKAPLQFSKDTYEEELEVLLAQIGDNYAELFLSAKKLYDSILLSGILTVTDVSTKAPLSASMIQRYNEHQMDLAQLKQFIRQKLSDKYNEVFSDVSKDGYAGYIDGKTNQEAFYKYLKGLLNKIEGSGYFLDKIEREDFLRKQRTFDNGSIPHQIHLQEMRAIIRRQAEFYPFLADNQDRIEKILTFRIPYYVGPLARGKSDFAWLSRKSADKITPWNFDEIVDKESSAEAFINRMTNYDLYLPNQKVLPKHSLLYEKFTVYNELTKVKYKTEQGKTAFFDANMKQEIFDGVFKVYRKVTKDKLMDFLEKEFDEFRIVDLTGLDKENKAFNASYGTYHDLRKILDKDFLDNSKNEKILEDIVLTLTLFEDREMIRKRLENYSDLLTKEQVKKLERRHYTGWGRLSAELIHGIRNKESRKTILDYLIDDGNSNRNFMQLINDDALSFKEEIAKAQVIGETDNLNQVVSDIAGSPAIKKGILQSLKIVDELVKIMGHQPENIVVEMARENQFTNQGRRNSQQRLKGLTDSIKEFGSQILKEHPVENSQLQNDRLFLYYLQNGRDMYTGEELDIDYLSQYDIDHIIPQAFIKDNSIDNRVLTSSKENRGKSDDVPSKNVVRKMKSYWSKLLSAKLITQRKFDNLTKAERGGLTDDDKAGFIKRQLVETRQITKHVARILDERFHTETDENNKKIRQVKIVTLKSNLVSNFRKEFELYKVREINDYHHAHDAYLNAVIGKALLGVYPQLEPEFVYGDYPHFHGHKENKATAKKFFYSNIMNFFKKDDVRTDKNGEIIWKKDEHISNIKKVLSYPQVNIVKKVEEQTGGFSKESILPKGNSDKLIPRKTKKFYWDTKKYGGFDSPIVAYSILVIADIEKGKSKKLKTVKALVGVTIMEKMTFERDPVAFLERKGYRNVQEENIIKLPKYSLFKLENGRKRLLASARELQKGNEIVLPNHLGTLLYHAKNIHKVDEPKHLDYVDKHKDEFKELLDVVSNFSKKYTLAEGNLEKIKELYAQNNGEDLKELSSSFINLLTFTAIGAPAAFKFFDKNIDRKRYTSTTEILNATLIHQSITGLYETRIDLSKLGGD

SEQ ID NO: 685 - protein, 1345 aa, Streptococcus mutans; identical to SEQ ID NO: 681

SEQ ID NO: 686 - protein, 1345 aa, Streptococcus mutans; identical to SEQ ID NO: 682

SEQ ID NO: 687 - protein, 1345 aa, Streptococcus mutans; identical to SEQ ID NO: 683

SEQ ID NO: 688 - protein, 1345 aa, Streptococcus mutans; identical to SEQ ID NO: 684

SEQ ID NO: 689 - protein, 1345 aa, Streptococcus mutans; identical to SEQ ID NO: 682

SEQ ID NO: 690 - protein, 1345 aa, Streptococcus mutans; identical to SEQ ID NO: 682

SEQ ID NO: 691 - protein, 1345 aa, Streptococcus mutans; identical to SEQ ID NO: 682

SEQ ID NO: 692 - protein, 1345 aa, Streptococcus mutans; identical to SEQ ID NO: 682

SEQ ID NO: 693 - protein, 1359 aa, Streptococcus mutans
MKKPYSIGLDIGTNSVGWAVVTDDYKVPAKKMKVLGNTDKSHIKKNLLGALLFDSGNTAEDRRLKRTARRRYTRRRNRILYLQEIFAEEMMQVDESFFQRLDDSFLVEEDKRGSRYPIFGTLKEEKKYHKEFKTIYHLREKLANSTEKADLRLVYLSLAHMIKFRGHFLIEGQLKAENTNVQALFKDFVEVYDKTVEESHLSEMTVDALSILTEKVSKSRRLENLVECYPTEKKNTLFGNLIALSLGLQPNFKTNFQLSEDAKLQFSKDTYEEDLEGLLGEIGDEYADLFASAKNLYDAILLSGILAVDDNTTKAPLSASMVKRYKEHKEELAAFKRFIKEKLPKKYEEIFKDDTKNGYAGYVGADKKLRKRSGKLATEEEFYKYVKGILNKVEGADVWLDKIDREDFLRKQRTFDNGSIPHQIHLQEMHAILRRQGEHYPFLKENQDKIEKILTFRIPYYVGPLVRKGSRFAWAEYKADEKITPWNFDDILDKEKSAEKFITRMTLNDLYLPEEKVLPKHSLLYETFTVYNELTKVKYVNEQGEAKFFDANMKQEIFDHVFKENRKVTKDKLLNYLNKEFEEFRIVNLTGLDKENKVFNSSLGTYHDLRKILNKSFLDNKENEQIIEDIIQTLTLFEDREMIRQRLQKYSDIFTKAQLKKLERRHYTGWGRLSYKLINGIRDKQSNKTILGYLIDDGYSNRNFMQLINDDALSFKEEIAKAQVIGEMDGLNQVVSDIAGSPAIKKGILQSLKIVDELVKVMGHNPANIVIEMARENQTTAKGRRSSQKRYKRLEEAIKNLDHDLNHKILKEHPTDNQALQNDRLFLYYLQNGRDMYTEDPLDINRLSDYDIDHIIPQAFIKDNSIDNRVLTRSDKNRGKSDDVPSEEVVHKMKPFWSKLLSAKLITQRKFDNLTKAERGGLTDDDKAGFIKRQLVETRQITKHVARILDERFNTETDENNKKIRQVKIVTLKSNLVSNFRKEFELYKVREINDYHHAHDAYLNAVIGKALLGVYPQLEPEFVYGDYPHFHGHKENKATAKKFFYSNIMNFFKKGDVRTDKNGEIIWKKDEHISNIKKVLSYPQVNIVKKVEEQTGGFSKESILPKGNSDKLIPRKTKKFYWDTKKYGGFDSPIVAYSILVIADIEKGKSKKLKTVKALVGVTIMEKMTFERDPVAFLERKGYRNVQEENIIKLPKYSLFKLENGRKRLLASARELQKGNEIVLPNHLETLLYHAKNIHKVDEPKHLDYVDKHKDEFKELLDVVSNFSKKYTLAEGNLEKIKELYAQNNGEDLKELASSFINLLTFTAIGAPAAFKFFDKNIDRKRYTSTTEILNATLIHQSITGLYETRIDLNKLGGD

SEQ ID NO: 694 - protein, 1359 aa, Streptococcus mutans; identical to SEQ ID NO: 693

SEQ ID NO: 695 - protein, 1355 aa, Streptococcus mutans
MKKPYSIGLDIGTNSVGWAVVTDDYKVPAKKMKVLGNTDKSHIKKNLLGALLFDSGNTAEDRRLKRTARRRYTRRRNRILYLQEIFAEEMSKVDDSFFHRLDESFLTDDDKNFDSHPIFGNKAEEDAYHQKFPTIYHLRKHLADSTEKADLRLVYLALAHMIKFRGHFLIEGELNAENTDVQKLFADFVGVYDRTFDDSHLSEITVDASSILTEKISKSRRLEKLINNYPKEKKNTLFGNLIALSLGLQPNFKTNFKLSEDAKLQFSKDTYEEDLEELLGKIGDDYADLFTLAKNLYDAILLSGILTADDSSTKAPLSASMIKRYAEHHEDLEKLKEFIKANKPELYHDIFKDETKNGYAGYIENGVKQDEFYKYLKNTLSKITGSDYFLDQIEREDFLRKQRTFDNGSIPHQIHLQEMHAILRRQGDYYPFLKENQDRIEKILTFRIPYYVGPLARKNSRFAWAEYHSDEAVTPWNFDQVIDKESSAQAFIEHMTNNDLYLPNEKVLPKHSPLYEKYTVYNELTKIKYVTEIGEAKFFDANLKQEIFDGLFKHERKVTKKKLRTFLDKNFDEFRIVDIQGLDKETETFNASYATYQDLLKVIKDKVFMDNPENAEILENIVLTLTLFEDREMIKQRLAKYADVFDKKVIDQLARRHYTGWGRLSAKLLNGIRDKQSCKTIMDYLIDDAQSNRNLMQLITDDNLTFKDDIVKAQYVDNSDDLHQVVQSLAGSPAIKKGILQSLKIVDELVKVMGKEPEQIVVEMARENQTTAKGRRNSQQRYKRLKEAIKSLDRDLNHKILKEHPTDNQALQNNRLFLYYLQNGRDMYTGESLDINRLSDYDIDHVIPQAFIKDNSIDNRVLTSSKANRGKSDDVPSEDVVNRMRPFWNKLLSSGLISQRKYNNLTKKELTLDDKAGFIKRQLVETRQITKHVARMLDERFNKEFDDNNKRIRRVKIVTLKSNLVSSFRKEFELYKVREINDYHHAHDAYLNAVVVKALLVKYPKLEPEFVYGEYPKYNSYRERKTATQKMFFYSNIMNMFKSKVKLADDQIVERPMIEVNDETGEIAWDKTKHITTVKKVLSYPQVNIVKKVEEQTIGQNGGLFDDNPKSPLEVIPSKLVPLKKALNPEKYGGYQKPTTAYPILLIVDTKQLIPISVMDKKRFEQNPVKFLKDKGYQQIEKNNFVKLPKYTLVDIGNGIKRLWASSKEVHKGNQLVVSKKSQDLLYHAHHLDNDYSNEYVKNHYQQFDILFNEITSFSKKCKLGKEHIQKIEEAYSKERDFASIEELADGFIKLLGFTQLGATSPFSFLGIKLNQKQYTGKKDYLLPCMEATLIHQSITGLYETRIDLSKLGGD

SEQ ID NO: 696 - protein, 1355 aa, Streptococcus mutans; identical to SEQ ID NO: 695

SEQ ID NO: 697 - protein, 1345 aa, Streptococcus mutans
MKKPYSIGLDIGTNSVGWAVVTDDYKVPAKKMKVLGNTDKSHIKKNLLGALLFDSGNTAEDRRLKRTARRRYTRRRNRILYLQEIFSEEMDKVDDSFFHRLEDSFLVTEDKRGERHPIFGNLEEEVKYHENFPTIYHLRQYLADNPEKVDLRLVYLALAHIIKFRGHFLIEGKFDTRNNDVQRLFQEFLAVYDNTFENSSLQEQNVQVEEILTDKISKSAKKDRVLKLFPNEKSNGRFAEFLKLIVGNQADFKKHFELEEKAPLQFSKDTYEEELEVLLAQIGDNYAELFLSAKKLYDSILLSGILTVTDVSTKAPLSASMIQRYNEHQMDLAQLKQFIRQKLSDKYNEVFSDVSKDGYAGYIDGKTNQEAFYKYLKGLLNKIEGSGYFLDKIEREDFLRKQRTFDNGSIPHQIHLQEMRAIIRRQAEFYPFLADNQDRIEKILTFRIPYYVGPLARGKSDFAWLSRKSADKITPWNFDEIVDKESSAEAFINRMTNYDLYLPNQKVLPKHSLLYEKFTVYNELTKVKYKTEQGKTAFFDANMKQEIFDGVFKVYRKVTKDKLMDFLEKEFDEFRIVDLTGLDKENKVFNASYGTYHDLCKILDKDFLDNSKNEKILEDIVLTLTLFEDREMIRKRLENYSDLLTKEQVKKLERRHYTGWGRLSAELIHGIRNKESRKTILDYLIDDGNSNRNFMQLINDDALSFKEEIAKAQVIGETDNLNQVVSDIAGSPAIKKGILQSLKIVDELVKIMGHQPENIVVEMARENQFTKQGRRNSQQRLKGLTDSIKEFGSQILKEHPVENSQLQNDRLFLYYLQNGRDMYTGEELDIDYLSQYDIDHIIPQAFIKDNSIDNRVLTSSKENRGKSDDVPSKDVVRKMKSYWSKLLSAKLITQRKFDNLTKAERGGLTDDDKAGFIKRQLVETRQITKHVARILDERFYTETDENNKKIRQVKIVTLKSNLVSNFRKEFELYKVREINDYHHAHDAYLNAVIGKALLGVYPQLEPEFVYGDYPHFHGHKENKATAKKFFYSNIMNFFKKDDVRTDKNGEIIWKKDEHISNIKKVLSYPQVNIVKKVEEQTGGFSKESILPKGNSDKLIPRKTKKFYWDTKKYGGFDSPIVAYSILVIADIEKGKSKKLKTVKALVGVTIMEKMTFERDPVAFLERKGYRNVQEENIIKLPKYSLFKLENGRKRLLASARELQKGNEIVLPNHLGTLLYHAKNIHKVDEPKHLDYVDKHKDEFKELLDVVSNFSKKYTLAEGNLEKIKELYAQNNGEDLKELASSFINLLTFTAIGAPATFKFFDKNIDRKRYTSTTEILNATLIHQSITGLYETRIDLSKLGGD

SEQ ID NO: 698 - protein, 1345 aa, Streptococcus mutans; identical to SEQ ID NO: 697

SEQ ID NO: 699 - protein, 1345 aa, Streptococcus mutans
MKKPYSIGLDIGTNSVGWAVVTDDYKVPAKKMKVLGNTDKSHIKKNLLGALLFDSGNTAEDRRLKRTARRRYTRRRNRILYLQEIFSEEMGKVDDSFFHRLDESFLTDDDKNFDSHPIFGNKAEEDAYHQKFPTIYHLRKHLADSTEKADLRLVYLALAHMIKFRGHFLIEGELNAENTDVQKLFADFVGVYDRTFDDSHLSEITVDASSILTEKISKSRRLEKLINNYPKEKKNTLFGNLIALSLGLQPNFKTNFKLSEDAKLQFSKDTYEEELEVLLAQIGDNYAELFLSAKKLYDSILLSGILTVTDVSTKAPLSASMIQRYNEHQMDLAQLKQFIRQKLSDKYNEVFSDVSKDGYAGYIDGKTNQEAFYKYLKGLLNKIEGSGYFLDKIEREDFLRKQRTFDNGSIPHQIHLQEMRAIIRRQAEFYPFLADNQDRIEKILTFRIPYYVGPLARGKSDFAWLSRKSADKITPWNFDEIVDKESSVEAFINRMTNYDLYLPNQKVLPKHSLLYEKFTVYNELTKVKYKTEQGKTAFFDANMKQEIFDGVFKVYRKVTKDKLMDFLEKEFDEFRIVDLTGLDKENKAFNASYGTYHDLRKILDKDFLDNSKNEKILEDIVLTLTLFEDREMIRKRLKNYSDLLTKEQLKKLERRHYTGWGRLSAELIHGIRNKESRKTILDYLIDDGNSNRNFMQLINDDALSFKEEIAKAQVIGETDNLNQVVSDIAGSPAIKKGILQSLKIVDELVKIMGHQPENIVVEMARENQFTNQGRRNSQQRLKGLTDSIKEFGSQILKEHPVENSQLQNDRLFLYYLQNGRDMYTGEELDIDYLSQYDIDHIIPQAFIKDNSIDNRVLTSSKENRGKSDDVPSKDVVRKMKSYWSKLLSAKLITQRKFDNLTKGERGGLTDDDKAGFIKRQLVETRQITKHVARILDERFNTETDENNKKIRQVKIVTLKSNLVSNFRKEFELYKVREINDYHHAHDAYLNAVIGKALLGVYPQLEPEFVYGDYPHFHGHKENKATAKKFFYSNIMNFFKKDDVRTDKNGEIIWKKDEYISNIKKVLSYPQVNIVKKVEEQTGGFSKESILPKGDSDKLIPRKTKKFYWDTKKYGGFDSPIVAYSILVIADIEKGKSKKLKTVKALVGVTIMEKMTFERDPVAFLERKGYRNVQEENIIKLPKYSLFKLENGRKRLLASARELQKGNEIVLPNHLGTLLYHAKNIHKVDEPKHLDYVDKHKDEFKELLDVVSNFSKKYTLAEGNLEKIKELYAQNNGEDLKELASSFINLLTFTAIGAPATFKFFDKNIDRKRYTSTTEILNATLIHQSITGLYETRIDLSKLGGD

SEQ ID NO: 700 - protein, 1345 aa, Streptococcus mutans
MKKPYSIGLDIGTNSVGWAVVTDDYKVPAKKMKVLGNTDKSHIKKNLLGALLFDSGNTAEDRRLKRTARRRYTRRRNRILYLQEIFSEEMGKVDDSFFHRLDESFLTDDDKNFDSYPIFGNKAEEDAYHQKFPTIYHLRKHLADSTEKADLRLVYLALAHMIKFRGHFLIEGELNAENTDVQKLFADFVGVYDRTFDDSHLSEITVDASSILTEKISKSRRLEKLINNYPKEKKNTLFRNLVALSLGLQPNFKTNFKLSEDAKLQFSKDTYEEDLEELLGKIGDDYADLFTLAKNLYDAILLSGILTADDSSTKAPLSASMIKRYAEHHEDLEKLKEFIKANKPELYHDIFKDETKNGYAGYIENGVKQDEFYKYLKNTLSKIAGSDYFLDKIEREDFLRKQRTFDNGSIPHQIHLQEMHAILRRQGDYYPFLKENQDRIEKILTFRIPYYVGPLARGKSDFAWLSRKSADKITPWNFDEIVDKESSVEAFINRMTNYDLYLPNQKVLPKHSLLYEKFTVYNELTKVKYKTEQGKTAFFDANMKQEIFDGVFKVYRKVTKDKLMDFLEKEFDEFRIVDLTGLDKENKAFNASYGTYHDLRKILDKDFLDNSKNEKILEDIVLTLTLFEDREMIRKRLKNYSDLLTKEQLKKLERRHYTGWGRLSAELIHGIRNKESRKTILDYLIDDGNSNRNFMQLINDDALSFKEEIAKAQVIGETDNLNQVVSDIAGSPAIKKGILQSLKIVDELVKIMGHQPENIVVEMARENQFTNQGRRNSQQRLKGLTDSIKEFGSQILKEHPVENSQLQNDRLFLYYLQNGRDMYTGEELDIDYLSQYDIDHIIPQAFIKDNSIDNRVLTSSKENRGKSDDVPSKDVVRKMKSYWSKLLSAKLITQRKFDNLTKGERGGLTDDDKAGFIKRQLVETRQITKHVARILDERFNTETDENNKKIRQVKIVTLKSNLVSNFRKEFELYKVREINDYHHAHDAYLNAVIGKALLGVYPQLEPEFVYGDYPHFHGHKENKATAKKFFYSNIMNFFKKDDVRTDKNGEIIWKKDEYISNIKKVLSYPQVNIVKKVEEQTGGFSKESILPKGDSDKLIPRKTKKFYWDTKKYGGFDSPIVAYSILVIADIEKGKSKKLKTVKALVGVTIMEKMTFERDPVAFLERKGYRNVQEENIIKLPKYSLFKLENGRKRLLASARELQKGNEIVLPNHLGTLLYHAKNIHKVDEPKHLDYVDKHKDEFKELLDVVSNFSKKYTLAEGNLEKIKELYAQNNGEDLKELASSFINLLTFTAIGAPATFKFFDKNIDRKRYTSTTEILNATLIHQSITGLYETRIDLSKLGGD

SEQ ID NO: 701 - protein, 1345 aa, Streptococcus mutans; identical to SEQ ID NO: 700

SEQ ID NO: 702 - protein, 1345 aa, Streptococcus mutans
MKKPYSIGLDIGTNSVGWAVVTDDYKVPAKKMKVLGNTDKSHIKKNLLGALLFDSGNTAEDRRLKRTARRRYTRRRNRILYLQEIFSEEMGKVDDSFFHRLEDSFLVTEDKRGERHPIFGNLEEEVKYHENFPTIYHLRQYLADNPEKTDLRLVYLALAHIIKFGGHFLIEGKFDTRNNDVQRLFQEFLAVYDNTFENSSLQEQNVQVEEILTDKISKSAKKDRVLKLFPNEKSNGRFAEFLKLIVGNQADFKKHFELEEKAPLQFSKDIYEEELEVLLAQIGDNYAELFLSAKKLYDSILLSGILTVTDVSTKAPLSASMIQRYNEHQMDLAQLKQFIRQKLSDKYNEVFSDVSKDGYAGYIDGKTNQEAFYKYLKGLLNKIEGSGYFLDKIEREDFLRKQRTFDNGSIPHQIHLQEMRAIIRRQAEFYPFLADNQDRIEKILTFRIPYYVGPLARGKSDFAWLSRKSADKITPWNFDEIVDKESSVEAFINRMTNYDLYLPNQKVLPKHSLLYEKFTVYNELTKVKYKTEQGKTAFFDANMKQEIFDGVFKVYRKVTKDKLMDFLEKEFDEFRIVDLTGLDKENKAFNASYGTYHDLRKILDKDFLDNSKNEKILEDIVLTLTLFEDREMIRKRLKNYSDLLTKEQLKKLERRHYTGWGRLSAELIHGIRNKESRKTILDYLIDDGNSNRNFMQLINDDALSFKEEIAKAQVIGETDNLNQVVSDIAGSPAIKKGILQSLKIVDELVKIMGHQPENIVVEMARENQFTNQGRRNSQQRLKGLTDSIKEFGSQILKEHPVENSQLQNDRLFLYYLQNGRDMYTGEELDIDYLSQYDIDHIIPQAFIKDNSIDNRVLTSSKENRGKSDDVPSKNVVRKMKSYWSKLLSAKLITQRKFDNLTKAERGGLTDDDKAGFIKRQLVETRQITKHVARILDERFHTETDENNKKIRQVKIVTLKSNLVSNFRKEFELYKVREINDYHHAHDAYLNAVIGKALLGVYPQLEPEFVYGDYPHFHGHKENKATAKKFFYSNIMNFFKKDDVRTDKNGEIIWKKDEHISNIKKVLSYPQVNIVKKVEEQTGGFSKESILPKGNSDKLIPRKTKKFYWDTKKYGGFDSPIVAYSILVIADIEKGKSKKLKTVKALVGVTIMEKMTFERDPVAFLERKGYRNVQEENIIKLPKYSLFKLENGRKRLLASARELQKGNEIVLPNHLGTLLYHAKNIHKVDEPKHLDYVDKHKDEFKELLDVVSNFSKKYTLAEGNLEKIKELYAQNNGEDLKELASSFINLLTFTAIGAPATFKFFDKNIDRKRYTSTTEILNATLIHQSITGLYETRIDLSKLGGD

SEQ ID NO: 703 - protein, 1345 aa, Streptococcus mutans; identical to SEQ ID NO: 702

SEQ ID NO: 704 - protein, 1345 aa, Streptococcus mutans
MKKPYSIGLDIGTNSVGWAVVTDDYKVPAKKMKVLGNTDKSHIKKNLLGALLFDSGNTAEDRRLKRTARRRYTRRRNRILYLQEIFSEEMGKVDDSFFHRLEDSFLVTEDKRGERHPIFGNLEEEVKYHENFPTIYHLRQYLADNPEKTDLRLVYLALAHIIKFRGHFLIEGKFDTRNNDVQRLFQEFLAVYDNTFENSSLQEQNVQVEEILTDKISKSAKKDRVLKLFPNEKSNGRFAEFLKLIVGNQADFKKHFELEEKAPLQFSKDIYEEELEVLLAQIGDNYAELFLSAKKLYDSILLSGILTVTDVSTKAPLSASMIQRYNEHQMDLAQLKQFIRQKLSDKYNEVFSDVSKDGYAGYIDGKTNQEAFYKYLKGLLNKIEGSGYFLDKIEREDFLRKQRTFDNGSIPHQIHLQEMRAIIRRQAEFYPFLADNQDRIEKILTFRIPYYVGPLARGKSDFAWLSRKSADKITPWNFDEIVDKESSVEAFINRMTNYDLYLPNQKVLPKHSLLYEKFTVYNELTKVKYKTEQGKTAFFDANMKQEIFDGVFKVYRKVTKDKLMDFLEKEFDEFRIVDLTGLDKENKAFNASYGTYHDLRKILDKDFLDNSKNEKILEDIVLTLTLFEDREMIRKRLKNYSDLLTKEQLKKLERRHYTGWGRLSAELIHGIRNKESRKTILDYLIDDGNSNRNFMQLINDDALSFKEEIAKAQVIGETDNLNQVVSDIAGSPAIKKGILQSLKIVDELVKIMGHQPENIVVEMARENQFTNQGRRNSQQRLKGLTDSIKEFGSQILKEHPVENSQLQNDRLFLYYLQNGRDMYTGEELDIDYLSQYDIDHIIPQAFIKDNSIDNRVLTSSKENRGKSDDVPSKNVVRKMKSYWSKLLSAKLITQRKFDNLTKAERGGLTDDDKAGFIKRQLVETRQITKHVARILDERFHTETDENNKKIRQVKIVTLKSNLVSNFRKEFELYKVREINDYHHAHDAYLNAVIGKALLGVYPQLEPEFVYGDYPHFHGHKENKATAKKFFYSNIMNFFKKDDVRTDKNGEIIWKKDEHISNIKKVLSYPQVNIVKKVEEQTGGFSKESILPKGNSDKLIPRKTKKFYWDTKKYGGFDSPIVAYSILVIADIEKGKSKKLKTVKALVGVTIMEKMTFERDPVAFLERKGYRNVQEENIIKLPKYSLFKLENGRKRLLASARELQKGNEIVLPNHLGTLLYHAKNIHKVDEPKHLDYVDKHKDEFKELLDVVSNFSKKYTLAEGNLEKIKELYAQNNGEDLKELASSFINLLTFTAIGAPATFKFFDKNIDRKRYTSTTEILNATLIHQSITGLYETRIDLSKLGGD

SEQ ID NO: 705 - protein, 1345 aa, Streptococcus mutans
MKKPYSIGLDIGTNSVGWAVVTDDYKVPAKKMKVLGNTDKSHIKKNLLGALLFDSGNTAEDRRLKRTARRRYTRRRNRILYLQEIFSEEMGKVDDSFFHRLEDSFLVTEDKRGERHPIFGNLEEEVKYHENFPTIYHLRQYLADNPEKTDLRLVYLALAHIIKFRGHFLIEGKFDTRNNDVQRLFQEFLAVYDNTFENSSLQEQNVQVEEILTDKISKSAKKDRVLKLFPNEKSNGRFAEFLKLIVGNQADFKKHFELEEKAPLQFSKDIYEEELEVLLAQIGDNYAELFLSAKKLYDSILLSGILTVTDVSTKAPLSASMIQRYNEHQMDLAQLKQFIRQKLSDKYNEVFSDVSKDGYAGYIDGKTNQEAFYKYLKGLLNKIEGSGYFLDKIEREDFLRKQRTFDNGSIPHQIHLQEMRAIIRRQAEFYPFLADNQDRIEKILTFRIPYYVGPLARGKSDFAWLSRKSADKITPWNFDEIVDKESSVEAFINRMTNYDLYLPNQKVLPKHSLLYEKFTVYNELTKVKYKTEQGKTAFFDANMKQEIFDGVFKVYRKVTKDKLMDFLEKEFDEFRIVDLTGLDKENKAFNASYGTYHDLRKILDKDFLDNSKNEKILEDIVLTLTLFEDREMIRKRLKNYSDLLTKEQLKKLERRHYTGWGRLSAELIHGIRNKESRKTILDYLIDDGNSNRNFMQLINDDALSFKEEIAKAQVIGETDNLNQVVSDIAGSPAIKKGILQSLKIVDELVKIMGHQPENIVVEMARENQFTNQGRRNSQQRLKGLTDSIKEFGSQILKEHPVENSQLQNDRLFLYYLQNGRDMYTGEELDIDYLSQYDIDHIIPQAFIKDNSIDNRVLTSSKENRGKSDDVPSKDVVRKMKSYWSKLLSAKLITQRKFDNLTKAERGGLTDDDKAGFIKRQLVETRQITKHVARILDERFNTETDENNKKIRQVKIVTLKSNLVSNFRKEFELYKVREINDYHHAHDAYLNAVIGKALLGVYPQLEPEFVYGDYPHFHGHKENKATAKKFFYSNIMNFFKKDDVRTDKNGEIIWKKDEHISNIKKVLSYPQVNIVKKVEEQTGGFSKESILPKGNSYKLIPRKTKKFYWDTKKYGGFDSPIVAYSILVIADIEKGKSKKLKTVKALVGVTIMEKMTFERDPVAFLERKGYRNVQEENIIKLPKYSLFKLENGRKRLLASARELQKGNEIVLPNHLGTLLYHAKNIHKVDEPKHLDYVDKHKDEFKELLDVVSNFSKKYTLAEGNLEKIKELYAQNNGEDLKELASSFINLLTFTAIGAPAAFKFFDKNIDRKRYTSTTEILNATLIHQSITGLYETRIDLSKLGGD

SEQ ID NO: 706 - protein, 1345 aa, Streptococcus mutans
MKKPYSIGLDIGTNSVGWAVVTDDYKVPAKKMKVLGNTDKSHIKKNLLGALLFDSGNTAEDRRLKRTARRRYTRRRNRILYLQEIFSEEMGKVDDSFFHRLEDSFLVTEDKRGERHPIFGNLEEEVKYHENFPTIYHLRQYLADNPEKTDLRLVYLALAHIIKFRGHFLIEGKFDTRNNDVQRLFQEFLAVYDNTFENSSLQEQNVQVEEILTDKISKSAKKDRVLKLFPNEKSNGRFAEFLKLIVGNQADFKKHFELEEKAPLQFSKDIYEEELEVLLAQIGDNYAELFLSAKKLYDSILLSGILTVTDVSTKAPLSASMIQRYNEHQMDLAQLKQFIRQKLSDKYNEVFSDVSKDGYAGYIDGKTNQEAFYKYLKGLLNKIEGSGYFLDKIEREDFLRKQRTFDNGSIPHQIHLQEMRAIIRRQAEFYPFLADNQDRIEKILTFRIPYYVGPLARGKSDFAWLSRKSADKITPWNFDEIVDKESSAEAFINRMTNYDLYLPNQKVLPKHSLLYEKFTVYNELTKVKYKTEQGKTAFFDANMKQEIFDGVFKVYRKVTKDKLMDFLEKEFDEFRIVDLTGLDKENKAFNASYGTYHDLRKILDKDFLDNSKNEKILEDIVLTLTLFEDREMIRKRLKNYSDLLTKEQLKKLERRHYTGWGRLSAELIHGIRNKESRKTILDYLIDDGNSNRNFMQLINDDALSFKEEIAKAQVIGETDNLNQVVSDIAGSLAIKKGILQSLKIVDELVKIMGHQPENIVVEMARENQFTNQGRRNSQQRLKGLTDSIKEFGSQILKEHPVENSQLQNDRLFLYYLQNGRDMYTGEELDIDYLSQYDIDHIIPQAFIKDNSIDNRVLTSSKENRGKSDDVPSKDVVRKMKSYWSKLLSAKLITQRKFDNLTKGERGGLTDDDKAGFIKRQLVETRQITKHVARILDERFNTETDENNKKIRQVKIVTLKSNLVSNFRKEFELYKVREINDYHHAHDAYLNAVIGKALLGVYPQLEPEFVYGDYPHFHGHKENKATAKKFFYSNIMNFFKKDDVRTDKNGEIIWKKDEYISNIKKVLSYPQVNIVKKVEEQTGGFFKESILPKGDSDKLIPRKTKKFYWDTKKYGGFDSPIVAYSILVIADIEKGKSKKLKTVKALVGVTIMEKMTFERDPVAFLERKGYRNVQEENIIKLPKYSLFKLENGRKRLLASARELQKGNEIVLPNHLGTLLYHAKNIHKVDEPKHLDYVDKHKDEFKELLDVVSNFSKKYTLAEGNLEKIKELYAQNNGEDLKELASSFINLLTFTAIGAPATFKFFDKNIDRKRYTSTTEILNATLIHQSITGLYETRIDLSKLGGD

SEQ ID NO: 707 - protein, 1345 aa, Streptococcus mutans
MKKPYSIGLDIGTNSVGWAVVTDDYKVPAKKMKVLGNTDKSHIKKNLLGALLFDSGNTAEDRRLKRTARRRYTRRRNRILYLQEIFSEEMGKVDDSFFHRLEDSFLVTEDKRGERHPIFGNLEEEVKYHENFPTIYHLRQYLADNPEKTDLRLVYLALAHIIKFRGHFLIEGKFDTRNNDVQRLFQEFLAVYDNTFENSSLQEQNVQVEEILTDKISKSAKKDRVLKLFPNEKSNGRFAEFLKLIVGNQADFKKHFELEEKAPLQFSKDIYEEELEVLLAQIGDNYAELFLSAKKLYDSILLSGILTVTDVSTKAPLSASMIQRYNEHQMDLAQLKQFIRQKLSDKYNEVFSDVSKDGYAGYIDGKTNQEAFYKYLKGLLNKIEGSGYFLDKIEREDFLRKQRTFDNGSIPHQIHLQEMRAIIRRQAEFYPFLADNQDRIEKILTFRIPYYVGPLARGKSDFAWLSRKSADKITPWNFDEIVDKESSVEAFINRMTNYDLYLPNQKVLPKHSLLYEKFTVYNELTKVKYKTEQGKTAFFDANMKQEIFDGVFKVYRKVTKDKLMDFLEKEFDEFRIVDLTGLDKENKAFNASYGTYHDLRKILDKDFLDNSKNEKILEDIVLTLTLFEDREMIRKRLKNYSDLLTKEQLKKLERRHYTGWGRLSAELIHGIRNKESRKTILDYLIDDGNSNRNFMQLINDDALSFKEEIAKAQVIGETDNLNQVVSDIAGSPAIKKGILQSLKIVDELVKIMGHQPENIVVEMARENQFTNQGRRNSQQRLKGLTDSIKEFGSQILKEHPVENSQLQNDRLFLYYLQNGRDMYTGEELDIDYLSQYDIDHIIPQAFIKDNSIDNRVLTSSKENRGKSDDVPSKDVVRKMKSYWSKLLSAKLITQRKFDNLTKAERGGLTDDDKAGFIKRQLVETRQITKHVARILDERFNTETDENNKKIRQVKIVTLKSNLVSNFRKEFELYKVREINDYHHAHDAYLNAVIGKALLGVYPQLEPEFVYGDYPHFHGHKENKATAKKFFYSNIMNFFKKDDVRTDKNGEIIWKKDEHISNIKKVLSYPQVNIVKKVEEQTGGFSKESILPKGNSDKLIPRKTKKFYWDTKKYGGFDSPIVAYSILVIADIEKGKSKKLKTVKALVGVTIMEKMTFERDPVAFLERKGYRNVQEENIIKLPKYSLFKLENGRKRLLASARELQKGNEIVLPNHLGTLLYHAKNIHKVDEPKHLDYVDKHKDEFKELLDVVSNFSKKYTLAEGNLEKIKELYAQNNGEDLKELASSFINLLTFTAIGAPATFKFFDKNIDRKRYTSTTEILNATLIHQSITGLYETRIDLNKLGGD

SEQ ID NO: 708 - protein, 1345 aa, Streptococcus mutans; identical to SEQ ID NO: 707

SEQ ID NO: 709 - protein, 1345 aa, Streptococcus mutans; identical to SEQ ID NO: 704

SEQ ID NO: 710 - protein, 1345 aa, Streptococcus mutans; identical to SEQ ID NO: 705

SEQ ID NO: 711 - protein, 1345 aa, Streptococcus mutans; identical to SEQ ID NO: 706

SEQ ID NO: 712 - protein, 1345 aa, Streptococcus mutans
MKKPYSIGLDIGTNSVGWAVVTDDYKVPAKKMKVLGNTDKSHIKKNLLGALLFDSGNTAEDRRLKRTARRRYTRRRNRILYLQEIFSEEMGKVDDSFFHRLEDSFLVTEDKRGERHPIFGNLEEEVKYHENFPTIYHLRQYLADNPEKVDLRLVYLALAHIIKFRGHFLIEGKFDTRNNDVQKLFQEFLAVYDNTFENSSLQEQNVQVEEILTDKISKSAKKDRVLKLFPNEKSNGRFAEFLKLIVGNQADFKKHFELEEKAPLQLSKDTYEEELEVLLAQIGDNYAELFLSAKKLYDSILLSGILTVTDVSTKAPLSASMIQRYNEHQMDLAQLKQFIRQKLSDKYNEVFSDVSKDGYAGYIDGKTNQEAFYKYLKGLLNKIEGSGYFLDKIEREDFLRKQRTFDNGSIPHQIHLQEMRAIIRRQAEFYPFLADNQDRIEKILTFRIPYYVGPLARGKSDFAWLSRKSADKITPWNFDEIVDKESSVEAFINRMTNYDLYLPNQKVLPKHSLLYEKFTVYNELTKVKYKTEQGKTAFFDANMKQEIFDGVFKVYRKVTKDKLMDFLEKEFDEFRIVDLTGLDKENKAFNASYGTYHDLRKILDKDFLDNSKNEKILEDIVLTLTLFEDREMIRKRLENYSDLLTKEQVKKLERRHYTGWGRLSAELIHGIRNKESRKTLLDYLIDDGNSNRNFMQLINDDALSFKEEIAKAQVIGETDNLNQVVSDIAGSPAIKKGILQSLKIVDELVKIMGHQPENIVVEMARENQFTNQGRRNSQQRLKGLTDSIKEFGSQILKEHPVENSQLQNDRLFLYYLQNGRDMYTGEELDIDYLSQYDIDHIIPQAFIKDNSIDNRVLTSSKENRGKSDDVPSKDVVRKMKSYWSKLLSAKLITQRKFDNLTKAERGGLTDDDKAGFIKRQLVETRQITKHVARILDERFNTETDENNKKIRQVKIVTLKSNLVSNFRKEFELYKVREINDYHHAHDAYLNAVIGKALLGVYPQLEPEFVYGDYPHFHGHKENKATAKKFFYSNIMNFFKKDDVRTDKNGEIIWKKDEYISNIKKVLSYPQVNIVKKVEEQTGGFSKESILPKGNSDKLIPRKTKKFYWDTKKYGGFDSPIVAYSILVIADIEKGKSKKLKTVKALVGVTIMEKMTFERDPIAFLERKGYRNVQEENIIKLPKYSLFKLENGRKRLLASARELQKGNEIVLPNHLGTLLYHAKNIHKVDEPKHLDYVDKHKDEFKELLDVVSNFSKKYTLAEGNLEKIKELYAQNNGEDLKELASSFINLLTFTAIGAPATFKFFDKNIDRKRYTSTTEILNATLIHQSITGLYETRIDLSKLGGD

SEQ ID NO: 713 - protein, 1345 aa, Streptococcus mutans; identical to SEQ ID NO: 712

SEQ ID NO: 714 - protein, 1345 aa, Streptococcus mutans
MKKPYSIGLDIGTNSVGWAVVTDDYKVPAKKMKVLGNTDKSHIKKNLLGALLFDSGNTAEDRRLKRTARRRYTRRRNRILYLQEIFSEEMGKVDDSFFHRLEDSFLVTEDKRGERHPIFGNLEEEVKYHENFPTIYHLRQYLADNPEKVDLRLVYLALAHIIKFRGHFLIEGKFDTRNNDVQRLFQEFLAVYDNTFENSSLQEQNVQVEEILTDKISKSAKKDRVLKLFPNEKSNGRFAEFLKLIVGNQADFKKHFELEEKAPLQFSKDTYEEDLEELLGKIGDDYADLFTLAKNLYDAILLSGILTADDSSTKAPLSASMIQRYNEHQMDLAQLKQFIRQKLSDKYNEVFSDVSKDGYAGYIDGKTNQEAFYKYLKGLLNKIEGSGYFLDKIEREDFLRKQRTFDNGSIPHQIHLQEMRAIIRRQAEFYPFLADNQDRIEKILTFRIPYYVGPLARGKSDFAWLSRKSADKITPWNFDEIVDKESSAEAFINRMTNYDLYLPNQKVLPKHSLLYEKFTVYNELTKVKYKTEQGKTAFFDANMKQEIFDGVFKVYRKVTKDKLMDFLEKEFDEFRIVDLTGLDKENKVFNASYGTYHDLCKILDKDFLDNSKNEKILEDIVLTLTLFEDREMIRKRLENYSDLLTKEQVKKLERRHYTGWGRLSAELIHGIRNKESRKTILDYLIDDGNSNRNFMQLINDDALSFKEEIAKAQVIGETDNLNQVVSDIAGSPAIKKGILQSLKIVDELVKIMGHQPENIVVEMARENQFTNQGRRNSQQRLKGLTDSIKEFGSQILKEHPVENSQLQNDRLFLYYLQNGRDMYTGEELDIDYLSQYDIDHIIPQAFIKDNSIDNRVLTSSKENRGKSDDVPSKDVVRKMKSYWSKLLSAKLITQRKFDNLTKAERGGLTDDDKAGFIKRQLVETRQITKHVARILDERFYTETDENNKKIRQVKIVTLKSNLVSNFRKEFELYKVREINDYHHAHDAYLNAVIGKALLGVYPQLEPEFVYGDYPHFHGHKENKATAKKFFYSNIMNFFKKDDVRTDKNGEIIWKKDEHISNIKKVLSYPQVNIVKKVEEQTGGFSKESILPKGNSDKLIPRKTKKFYWDTKKYGGFDSPIVAYSILVIADIEKGKSKKLKTVKALVGVTIMEKMTFERDPVAFLERKGYRNVQEENIIKLPKYSLFKLENGRKRLLASARELQKGNEIVLPNHLGTLLYHAKNIHKVDEPKHLDYVDKHKDEFKELLDVVSNFSKKYTLAEGNLEKIKELYAQNNGEDLKELASSFINLLTFTAIGAPATFKFFDKNIDRKRYTSTTEILNATLIHQSITGLYETRIDLSKLGGD

SEQ ID NO: 715 - protein, 1345 aa, Streptococcus mutans
MKKPYSIGLDIGTNSVGWAVVTDDYKVPAKKMKVLGNTDKSHIKKNLLGALLFDSGNTAEDRRLKRTARRRYTRRRNRILYLQEIFSEEMGKVDDSFFHRLEDSFLVTEDKRGERHPIFGNLEEEVKYHENFPTIYHLRQYLADNPEKVDLRLVYLALAHIIKFRGHFLIEGKFDTRNNDVQRLFQEFLAVYDNTFENSSLQEQNVQVEEILTDKISKSAKKDRVLKLFPNEKSNGRFAEFLKLIVGNQADFKKHFELEEKAPLQFSKDTYEEDLEELLGKIGDDYADLFTLAKNLYDAILLSGILTADDSSTKAPLSASMIQRYNEHQMDLAQLKQFIRQKLSDKYNEVFSDVSKDGYAGYIDGKTNQEAFYKYLKGLLNKIEGSGYFLDKIEREDFLRKQRTFDNGSIPHQIHLQEMRAIIRRQAEFYPFLADNQDRIEKILTFRIPYYVGPLARGKSDFAWLSRKSADKITPWNFDEIVDKESSAEAFINRMTNYDLYLPNQKVLPKHSLLYEKFTVYNELTKVKYKTEQGKTAFFDANMKQEIFDGVFKVYRKVTKDKLMDFLEKEFDEFRIVDLTGLDKENKVFNASYGTYHDLCKILDKDFLDNSKNEKILEDIVLTLTLFEDREMIRKRLENYSDLLTKEQVKKLERRHYTGWGRLSAELIHGIRNKESRKTILDYLIDDGNSNRNFMQLINDDALSFKEEIAKAQVIGETDNLNQVVSDIAGSPAIKKGILQSLKIVDELVKIMGHQPENIVVEMARENQFTNQGRRNSQQRLKGLTDSIKEFGSQILKEHPVENSQLQNDRLFLYYLQNGRDMYTGEELDIDYLSQYDIDHIIPQAFIKDNSIDNRVLTSSKENRGKSDDVPSKDVVRKMKPYWSKLLSAKLITQRKFDNLTKAERGGLTDDDKAGFIKRQLVETRQITKHVARILDERFNTETDENNKKIRQVKIVTLKSNLVSNFRKEFELYKVREINDYHHAHDAYLNAVIGKALLGVYPQLEPEFVYGDYPHFHGHEENKATAKKFFYSNIMNFFKKDDVRTDKNGEIIWKKDEHISNIKKVLSYPQVNIVKKVEEQTGGFSKESILPKGNSDKLIPRKTKKFYWDTKKYGGFDSPIVAYSILVIADIEKGKSKKLKTVKALVGVTIMEKMTFERDPVAFLERKGYRNVQEENIIKLPKYSLFKLENGRKRLLASARELQKGNEIVLPNHLGTLLYHAKNIHKVDEPKHLDYVDKHKDEFKELLDVVSNFSKKYTLAEGNLEKIKELYAQNNGEDLKELASSFINLLTFTAIGAPATFKFFDKNIDRKRYTSTTEILNATLIHQSITGLYETRIDLSKLGGD

SEQ ID NO: 716 - protein, 1345 aa, Streptococcus mutans
MKKPYSIGLDIGTNSVGWAVVTDDYKVPAKKMKVLGNTDKSHIKKNLLGALLFDSGNTAEDRRLKRTARRRYTRRRNRILYLQEIFSEEMGKVDDSFFHRLEDSFLVTEDKRGERHPIFGNLEEEVKYHENFPTIYHLRQYLADNPEKVDLRLVYLALAHIIKFRGHFLIEGKFDTRNNDVQRLFQEFLAVYDNTFENSSLQEQNVQVEEILTDKISKSAKKDRVLKLFPNEKSNGRFAEFLKLIVGNQADFKKHFELEEKAPLQFSKDTYEEELEVLLAQIGDNYAELFLSAKKLYDSILLSGILTVTDVSTKAPLSASMIQRYNEHQMDLAQLKQFIRQKLSDKYNEVFSDVSKDGYAGYIDGKTNQEAFYKYLKGLLNKIEGSGYFLDKIEREDFLRKQRTFDNGSIPHQIHLQEMRAIIRRQAEFYPFLADNQDRIEKILTFRIPYYVGPLARGKSDFAWLSRKSADKITPWNFDEIVDKESSAEAFINRMTNYDLYLPNQKVLPKHSLLYEKFTVYNELTKVKYKTEQGKTAFFDANMKQEIFDGVFKVYRKVTKDKLMDFLEKEFDEFRIVDLTGLDKENKVFNASYGTYHDLCKILDKDFLDNSKNEKILEDIVLTLTLFEDREMIRKRLENYSDLLTKEQVKKLERRHYTGWGRLSAELIHGIRNKESRKTILDYLIDDGNSNRNFMQLINDDALSFKEEIAKAQVIGETDNLNQVVSDIAGSPAIKKGILQSLKIVDELVKIMGHQPENIVVEMARENQFTKQGRRNSQQRLKGLTDSIKEFGSQILKEHPVENSQLQNDRLFLYYLQNGRDMYTGEELDIDYLSQYDIDHIIPQAFIKDNSIDNRVLTSSKENRGKSDDVPSKDVVRKMKSYWSKLLSAKLITQRKFDNLTKAERGGLTDDDKAGFIKRQLVETRQITKHVARILDERFYTETDENNKKIRQVKIVTLKSNLVSNFRKEFELYKVREINDYHHAHDAYLNAVIGKALLGVYPQLEPEFVYGDYPHFHGHKENKATAKKFFYSNIMNFFKKDDVRTDKNGEIIWKKDEHISNIKKVLSYPQVNIVKKVEEQTGGFSKESILPKGNSDKLIPRKTKKFYWDTKKYGGFDSPIVAYSILVIADIEKGKSKKLKTVKALVGVTIMEKMTFERDPVAFLERKGYRNVQEENIIKLPKYSLFKLENGRKRLLASARELQKGNEIVLPNHLGTLLYHAKNIHKVDEPKHLDYVDKHKDEFKELLDVVSNFSKKYTLAEGNLEKIKELYAQNNGEDLKELASSFINLLTFTAIGAPATFKFFDKNIDRKRYTSTTEILNATLIHQSITGLYETRIDLSKLGGD

SEQ ID NO: 717 - protein, 1345 aa, Streptococcus mutans
MKKPYSIGLDIGTNSVGWAVVTDDYKVPAKKMKVLGNTDKSHIKKNLLGALLFDSGNTAEDRRLKRTARRRYTRRRNRILYLQEIFSEEMGKVDDSFFHRLEDSFLVTEDKRGERHPIFGNLEEEVKYHENFPTIYHLRQYLADNPEKVDLRLVYLALAHIIKFRGHFLIEGKFDTRNNDVQRLFQEFLAVYDNTFENSSLQEQNVQVEEILTDKISKSAKKDRVLKLFPNEKSNGRFAEFLKLIVGNQADFKKHFELEEKAPLQFSKDTYEEELEVLLAQIGDNYAELFLSAKKLYDSILLSGILTVTDVSTKAPLSASMIQRYNEHQMDLAQLKQFIRQKLSDKYNEVFSDVSKDGYAGYIDGKTNQEAFYKYLKGLLNKIEGSGYFLDKIEREDFLRKQRTFDNGSIPHQIHLQEMRAIIRRQAEFYPFLADNQDRIEKILTFRIPYYVGPLARGKSDFAWLSRKSADKITPWNFDEIVDKESSAEAFINRMTNYDLYLPNQKVLPKHSLLYEKFTVYNELTKVKYKTEQGKTAFFDANMKQEIFDGVFKVYRKVTKDKLMDFLEKEFDEFRIVDLTGLDKENKVFNASYGTYHDLCKILDKDFLDNSKNEKILEDIVLTLTLFEDREMIRKRLENYSDLLTKEQVKKLERRHYTGWGRLSAELIHGIRNKESRKTILDYLIDDGNSNRNFMQLINDDALSFKEEIAKAQVIGETDNLNQVVSDIAGSPAIKKGILQSLKIVDELVKIMGHQPENIVVEMARENQFTKQGRRNSQQRLKGLTDSIKEFGSQILKEHPVENSQLQNDRLFLYYLQNGRDMYTGEELDIDYLSQYDIDHIIPQAFIKDNSIDNRVLTSSKENRGKSDDVPSKDVVRKMKSYWSKLLSAKLITQRKFDNLTKAERGGLTDDDKAGFIKRQLVETRQITKHVARILDERFYTETDENNKKIRQVKIVTLKSNLVSNFRKEFELYKVREINDYHHAHDAYLNAVIGKALLGVYPQLEPEFVYGDYPHFHGHKENKATAKKFFYSNIMNFFKKDDVRTDRNGEIIWKKDEHISNIKKVLSYPQVNIVKKVEEQTGGFSKESILPKGNSDKLIPRKTKKFYWDTKKYGGFDSPIVAYSILVIADIEKGKSKKLKTVKALVGVTIMEKMTFERDPVAFLERKGYRNVQEENIIKLPKYSLFKLENGRKRLLASARELQKGNEIVLPNHLGTLLYHAKNIHKVDEPKHLDYVDKHKDEFKELLDVVSNFSKKYTLAEGNLEKIKELYAQNNGEDLKELASSFINLLTFTAIGAPATFKFFDKNIDRKRYTSTTEILNATLIHQSITGLYETRIDLSKLGGD

SEQ ID NO: 718 - protein, 1345 aa, Streptococcus mutans
MKKPYSIGLDIGTNSVGWAVVTDDYKVPAKKMKVLGNTDKSHIKKNLLGALLFDSGNTAEDRRLKRTARRRYTRRRNRILYLQEIFSEEMGKVDDSFFHRLEDSFLVTEDKRGERHPIFGNLEEEVKYHENFPTIYHLRQYLADNPEKVDLRLVYLALAHIIKFRGHFLIEGKFDTRNNDVQRLFQEFLAVYDNTFENSSLQEQNVQVEEILTDKISKSAKKDRVLKLFPNEKSNGRFAEFLKLIVGNQADFKKHFELEEKAPLQFSKDTYEEELEVLLAQIGDNYAELFLSAKKLYDSILLSGILTVTDVSTKAPLSASMIQRYNEHQMDLAQLKQFIRQKLSDKYNEVFSDVSKDGYAGYIDGKTNQEAFYKYLKGLLNKIEGSGYFLDKIEREDFLRKQRTFDNGSIPHQIHLQEMRAIIRRQAEFYPFLADNQDRIEKILTFRIPYYVGPLARGKSDFAWLSRKSADKITPWNFDEIVDKESSAEAFINRMTNYDLYLPNQKVLPKHSLLYEKFTVYNELTKVKYKTEQGKTAFFDANMKQEIFDGVFKVYRKVTKDKLMDFLEKEFDEFRIVDLTGLDKENKVFNASYGTYHDLCKILDKDFLDNSKNEKILEDIVLTLTLFEDREMIRKRLENYSDLLTKEQVKKLERRHYTGWGRLSAELIHGIRNKESRKTILDYLIDDGNSNRNFMQLINDDALSFKEEIAKAQVIGETDNLNQVVSDIAGSPAIKKGILQSLKIVDELVKIMGHQPENIVVEMARENQFTNQGRQNSQQRLKGLTDSIKEFGSQILKEHPVENSQLQNDRLFLYYLQNGRDMYTGEELDIDYLSQYDIDHIIPQAFIKDNSIDNRVLTSSKENRGKSDDVPSEDVVRKMKSYWSKLLSAKLITQRKFDNLTKAERGGLTDDDKAGFIKRQLVETRQITKHVARILDERFYTETDENNKKIRQVKIVTLKSNLVSNFRKEFELYKVREINDYHHAHDAYLNAVIGKALLGVYPQLEPEFVYGDYPHFHGHKENKATAKKFFYSNIMNFFKKDDVRTDKNGEIIWKKDEHISNIKKVLSYPQVNIVKKVEEQTGGFSKESILPKGNSDKLIPRKTKKFYWDTKKYGGFDSPIVAYSILVIADIEKGKSKKLKTVKALVGVTIMEKMTFERDPVAFLERKGYRNVQEENIIKLPKYSLFKLENGRKRLLASARELQKGNEIVLPNHLGTLLYHAKNIHKVDEPKHLDYVDKHKDEFKELLDVVSNFSKKYTLAEGNLEKIKELYAQNNGEDLKELASSFINLLTFTAIGAPATFKFFDKNIDRKRYTSTTEILNATLIHQSITGLYETRIDLSKLGGD

SEQ ID NO: 719 - protein, 1345 aa, Streptococcus mutans; identical to SEQ ID NO: 718

SEQ ID NO: 720 - protein, 1345 aa, Streptococcus mutans; identical to SEQ ID NO: 714

SEQ ID NO: 721 - protein, 1345 aa, Streptococcus mutans; identical to SEQ ID NO: 715

SEQ ID NO: 722 - protein, 1345 aa, Streptococcus mutans; identical to SEQ ID NO: 716

SEQ ID NO: 723 - protein, 1345 aa, Streptococcus mutans; identical to SEQ ID NO: 717

SEQ ID NO: 724 - protein, 1345 aa, Streptococcus mutans; identical to SEQ ID NO: 716

SEQ ID NO: 725 - protein, 1345 aa, Streptococcus mutans; identical to SEQ ID NO: 716

SEQ ID NO: 726 - protein, 1345 aa, Streptococcus mutans; identical to SEQ ID NO: 716

SEQ ID NO: 727 - protein, 1345 aa, Streptococcus mutans; identical to SEQ ID NO: 717

SEQ ID NO: 728 - protein, 1345 aa, Streptococcus mutans
MKKPYSIGLDIGTNSVGWAVVTDDYKVPAKKMKVLGNTDKSHIKKNLLGALLFDSGNTAEDRRLKRTARRRYTRRRNRILYLQEIFSEEMGKVNDSFFHRLEDSFLVTEDKRGERHPIFGNLEEEVKYHENFPTIYHLRQYLADNPEKVDLRLVYLALAHIIKFRGHFLIEGKFDTRNNDVQRLFQEFLAVYDNTFENSSLQEQNVQVEEILTDKISKSAKKDRVLKLFPNEKSNGRFAEFLKLIVGNQADFKKHFELEEKAPLQFSKDTYEEELEVLLAQIGDNYAELFLSAKKLYDSILLSGILTVTDVSTKAPLSASMIQRYNEHQMDLAQLKQFIRQKLSDKYNEVFSDVSKDGYAGYIDGKTNQEAFYKYLKGLLNKIEGSGYFLDKIEREDFLRKQRTFDNGSIPHQIHLQEMRAIIRRQAEFYPFLADNQDRIEKILTFRIPYYVGPLARGKSDFAWLSRKSADKITPWNFDEIVDKESSAEAFINRMTNYDLYLPNQKVLPKHSLLYEKFTVYNELTKVKYKTEQGKTAFFDANMKQEIFDGVFKVYRKVTKDKLMDFLEKEFDEFRIVDLTGLDKENKVFNASYGTYHDLCKILDKDFLDNSKNEKILEDIVLTLTLFEDREMIRKRLENYSDLLTKEQVKKLERRHYTGWGRLSAELIHGIRNKESRKTILDYLIDDGNSNRNFMQLINDDALSFKEEIAKAQVIGETDNLNQVVSDIAGSPAIKKGILQSLKIVDELVKIMGHQPENIVVEMARENQFTKQGRRNSQQRLKGLTDSIKEFGSQILKEHPVENSQLQNDRLFLYYLQNGRDMYTGEELDIDYLSQYDIDHIIPQAFIKDNSIDNRVLTSSKENRGKSDDVPSKDVVRKMKSYWSKLLSAKLITQRKFDNLTKAERGGLTDDDKAGFIKRQLVETRQITKHVARILDERFYTETDENNKKIRQVKIVTLKSNLVSNFRKEFELYKVREINDYHHAHDAYLNAVIGKALLGVYPQLEPEFVYGDYPHFHGHKENKATAKKFFYSNIMNFFKKDDVRTDKNGEIIWKKDEYISNIKKVLSYPQVNIVKKVEEQTGGFSKESILPKGNSDKLIPRKTKKFYWDTKKYGGFDSPIVAYSILVIADIEKGKSKKLKTVKALVGVTIMEKMTFERDPIAFLERKGYRNVQEENIIKLPKYSLFKLENGRKRLLASARELQKGNEIVLPNHLGTLLYHAKNIHKVDEPKHLDYVDKHKDEFKELLDVVSNFSKKYTLAEGNLEKIKELYAQNNGEDLKELASSFINLLTFTAIGAPAAFKFFDKNIDRKRYTSTTEILNATLIHQSITGLYETRIDLSKLGGD

SEQ ID NO: 729 - protein, 1345 aa, Streptococcus mutans; identical to SEQ ID NO: 728

SEQ ID NO: 730 - protein, 1345 aa, Streptococcus mutans
MKKPYSIGLDIGTNSVGWAVVTDDYKVPAKKMKVLGNTDKSHIKKNLLGALLFDSGNTAEDRRLKRTTRRRYTRRRNRILYLQEIFSEEMGKVDDSFFHRLEDSFLVTEDKRGERHPIFGNLEEEVKYHENFPTIYHLRQYLADNPEKTDLRLVYLALAHIIKFRGHFLIEGKFDTRNNDVQRLFQEFLAVYDNTFENSSLQEQNVQVEEILTDKISKSAKKDRVLKLFPNEKSNGCFAEFLKLIVGNQADFKKHFELEEKAPLQFSKDTYEEELEVLLAQIGDNYAELFLSAKKLYDSILLSGILTVTDVSTKAPLSASMIQRYNEHQMDLTQLKQFIRQKLSDKYNEVFSDVSKDGYAGYIDGKTNQEAFYKYLKGLLNKIEGSGYFLDKIEREDFLRKQRTFDNGSIPHQIHLQEMRAIIRRQAEFYPFLADNQDRIEKLLTFRIPYYVGPLASGKSDFAWLSRKSADKITPWNFDEIVDKESSAEAFINRMTNYDLYLPNQKVLPKHSLLYEKFTVYNELTKVKYKTEQGKTAFFDANMKQEIFDGVFKVYRKVTKDKLMDFLEKEFDEFRIVDLTGLDKENKVFNASYGTYHDLCKILDKDFLDNSKNEKILEDIVLTLTLFEDREMIRKRLENYSDLLTKEQVKKLERRHYTGWGRLSAELIHGIRNKESRKTILDYLIDDGNSNRNFMQLINDDALSFKEEIAKAQVIGETDNLNQVVSDIAGSPAIKKGILQSLKIVDELVKIMGHQPENIVVEMARENQFTNQGRRNSQQRLKGLTDSIKEFGSQILKEHPVENSQLQNDRLFLYYLQNGRDMYTGEELDIDYLSQYDIDHIIPQAFIKDNSIDNRVLTSSKENRGKSDDVPSKDVVRKMKSYWSKLLSAKLITQRKFDNLTKAERGGLTDDDKAGFIKRQLVETRQITKHVARILDERFNTETDENNKKIRQVKIVTLKSNLVSNFRKEFELYKVREINDYHHAHDAYLNAVIGKALLGVYPQLEPEFVYGDYPHFHGHKENKATAKKFFYSNIMNFFKKDDVRTDKNGEIIWKKDEHISNIKKVLSYPQVNIVKKVEEQTGGFSKESILPKGNSDKLIPRKTKKFYWDTKKYGGFDSPIVAYSILVIADIEKGKSKKLKTVKALVGVTIMEKMTFERDPVAFLERKGYRNVQEENIIKLPKYSLFKLENGRKRLLASARELQKGNEIVLPNHLGTLLYHAKNIHKVDEPKHLDYVDKHKDEFKELLDVVSNFSKKYTLAEGNLEKIKELYAQNNGEDLKELASSFINLLTFTAIGAPATFKFFDKNIDRKRYTSTTEILNATLIHQSITGLYETRIDLSKLGGD

SEQ ID NO: 731 - protein, 1345 aa, Streptococcus mutans; identical to SEQ ID NO: 730

SEQ ID NO: 732 - protein, 1350 aa, Streptococcus mutans
MKKPYSIGLDIGTNSVGWAVVTDDYKVPAKKMTVLGNTDKSHIKKNLLGALLFDSGNTAADRRLKRTARRRYTRRRNRILYLQEIFAEEMSKVDDSFFHRLEDSFLVTEDKRGERHPIFGNLEEEVKYHENFPTIYHLRQYLADNPEKVDLRLVYLALAHIIKFRGHFLIEGKFDTRNNDVQRLFQEFLAVYDNTFENSSLQEQNVQVEEILTDKISKSAKKDRVLKLFPNEKSNGRFAEFLKLIVGNQADFKKHFELEEKTPLQFSKDTYEEELEVLLAQIGDNYAELFLSAKKLYDSILLSGILTVTDVSTKAPLSASMIQRYNEHQMDLAQLKQFIRQKLSDKYNEVFSDVSKDGYAGYIDGKTNQEAFYKYLKGLLNKIEGSGYFLDKIEREDFLRKQRTFDNGSIPHQIHLQEMRAIIRRQAEFYPFLADNQDRIEKILTFRIPYYVGPLARGKSDFAWLSRKSADKITPWNFDEIVDKESSAEAFINRMTNYDLYLPNQKVLPKHSLLYEKFTVYNELTKVKYKTEQGKTAFFDANMKQEIFDGVFKVYRKVTKDKLMDFLEKEFDEFRIVDLTGLDKENKAFNASYGTYHDLRKILDKDFLDNSKNEKILEDIVLTLTLFEDREMIRKRLENYSDLLTKEQVKKLERRHYTGWGRLSAELIHGIRNKESRKTILDYLIDDGNSNRNFMQLINDDALSFKEEIAKAQVIGETDNLNQVVSDIAGSPAIKKGILQSLKIVDELVKIMGHQPENIVVEMARENQFTNQGRRNSQQRLKGLTDSIKEFGSQILKEHPVENSQLQNDRLFLYYLQNGRDMYTGEELDIDYLSQYDIDHIIPQAFIKDNSIDNRVLTSSKENRGKSDDVPSEDVVNRMRPFWNKLLSSGLISQRKYNNLTKKELTPDDKAGFIKRQLVETRQITKHVARMLDERFNKEFDDNNKRIRRVKIVTLKSNLVSSFRKEFELYKVREINDYHHAHDAYLNAVVVKALLVKYPKLEPEFVYGEYPKYNSYRERKTATQKMFFYSNIMNMFKSKVKLADDQIVERPMIEVNDETGEIAWDKTKHITTVKKVLSYPQVNIVKKVEEQTIGQNGGLFDDNPKSPLEVIPSKLVPLKKALNPEKYGGYQKPTTAYPILLIVDTKQLIPISVMDKKRFEQNPVKFLKDKGYQQIEKNNFVKLPKYTLVDIGNGIKRLWASSKEVHKGNQLVVSKKSQDLLYHAHHLDNDYSNEYVKNHYQQFDILFNEITSFSKKCKLGKEHIQKIEEAYSKERDSASIEELADGFIKLLGFTQLGATSPFSFLGIKLNQKQYTGKKDYLLPCMEATLIHQSITGLYETRIDLSKLGGD

SEQ ID NO: 733 - protein, 1350 aa, Streptococcus mutans; identical to SEQ ID NO: 732

SEQ ID NO: 734 - protein, 1345 aa, Streptococcus mutans
MKKPYSIGLDIGTNSVGWAVVTDDYKVPDKKMKVLGNTDKSHIKKNLLGALLFDSGNTAEDRRLKRTARRRYTRRRNRILYLQEIFSEEMGKVDDSFFHRLEDSFLVTEDKRGERHPIFGNLEEEVKYHENFPTIYHLRQYLADNPEKTDLRLVYLALAHIIKFRGHFLIEGKFDTRNNDVQRLFQEFLAVYDNTFENSSLQEQNVQVEEILTDKISKSAKKDRVLKLFPNEKSNGRFAEFLKLIVGNQADFKKHFELEEKAPLQFSKDIYEEELEVLLAQIGDNYAELFLSAKKLYDSILLSGILTVTDVSTKAPLSASMIQRYNEHQMDLAQLKQFIRQKLSDKYNEVFSDVSKDGYAGYIDGKTNQEAFYKYLKGLLNKIEGSGYFLDKIEREDFLRKQRTFDNGSIPHQIHLQEMRAIIRRQAEFYPFLADNQDRIEKILTFRIPYYVGPLARGKSDFAWLSRKSADKITPWNFDEIVDKESSVEAFINRMTNYDLYLPNQKVLPKHSLLYEKFTVYNELTKVKYKTEQGKTAFFDANMKQEIFDGVFKVYRKVTKDKLMDFLEKEFDEFRIVDLTGLDKENKAFNASYGTYHDLRKILDKDFLDNSKNEKILEDIVLTLTLFEDREMIRKRLKNYSDLLTKEQLKKLERRHYTGWGRLSAELIHGIRNKESRKTILDYLIDDGNSNRNFMQLINDDALSFKEEIAKAQVIGETDNLNQVVSDIAGSPAIKKGILQSLKIVDELVKIMGHQPENIVVEMARENQFTNQGRRNSQQRLKGLTDSIKEFGSQILKEHPVENSQLQNDRLFLYYLQNGRDMYTGEELDIDYLSQYDIDHIIPQAFIKDNSIDNRVLTSSKENRGKSDDVPSKDVVRKMKSYWSKLLSAKLITQRKFDNLTKAERGGLTDDDKAGFIKRQLVETRQITKHVARILDERFYTETDENNKKIRQVKIVTLKSNLVSNFRKEFELYKVREINDYHHAHDAYLNAVIGKALLGVYPQLEPEFVYGDYPHFHGHKENKATAKKFFYSNIMNFFKKDDVRTDKNGEIIWKKDEHISNIKKVLSYPQVNIVKKVEEQTGGFSKESILPKGNSDKLIPRKTKKFYWDTKKYGGFDSPIVAYSILVIADIEKGKSKKLKTVKALVGVTIMEKMTFERDPVAFLERKGYRNVQEENIIKLPKYSLFKLENGRKRLLASARELQKGNEIVLPNHLGTLLYHAKNIHKVDEPKHLDYVDKHKDEFKELLDVVSNFSKKYTLAEGNLEKIKELYAQNNGEDLKELASSFINLLTFTAIGAPATFKFFDKNIDRKRYTSTTEILNATLIHQSITGLYETRIDLSKLGGD

SEQ ID NO: 735 - protein, 1345 aa, Streptococcus mutans
MKKPYSIGLDIGTNSVGWAVVTDDYKVSAKKMKVLGNTDKSHIKKNLLGALLFDSGNTAEDRRLKRTARRRYTRRRNRILYLQEIFAEEMSKVDDSFFHRLEDSFLVTEDKRGERHPIFGNLEEEVKYHENFPTIYHLRQYLADNPEKVDLRLVYLALAHIIKFRGHFLIEGKFDTRNNDVQRLFQEFLAVYDNTFENSSLQEQNVQVEEILTDKISKSAKKDRVLKLFPNEKSNGRFAEFLKLIVGNQADFKKHFELEEKAPLQFSKDTYEEELEVLLAQIGDNYAELFLSAKKLYDSILLSGILTVTDVSTKAPLSASMIQRYNEHQMDLAQLKQFIRQKLSDKYNEVFSDVSKDGYAGYIDGKTNQEAFYKYLKGLLNKIEGSGYFLDKIEREDFLRKQRTFDNGSIPHQIHLQEMRAIIRRQAEFYPFLADNQDRIEKILTFRIPYYVGPLARGKSDFAWLSRKSADKITPWNFDEIVDKESSAEAFINRMTNYDLYLPNQKVLPKHSLLYEKFTVYNELTKVKYKTEQGKTAFFDANMKQEIFDGVFKVYRKVTKDKLMDFLEKEFDEFRIVDLTGLDKENKAFNASYGTYHDLRKILDKDFLDNSKNEKILEDIVLTLTLFEDREMIRKRLENYSDLLTKEQVKKLERRHYTGWGRLSAELIHGIRNKESRKTILDYLIDDGNSNRNFMQLINDDALSFKEEIAKAQVIGETDNLNQVVSDIAGSPAIKKGILQSLKIVDELVKIMGHQPENIVVEMARENQFTNQGRRNSQQRLKGLTDSIKEFGSQILKEHPVEHSQLQNDRLFLYYLQNGRDMYTGEELDIDYLSQYDIDHIIPQAFIKDNSIDNRVLTSSKENRGKSDDVPSKNVVRKMKSYWSKLLSAKLITQRKFDNLTKAERGGLTDDDKAGFIKRQLVETRQITKHVARILDERFHTETDENNKKIRQVKIVTLKSNLVSNFRKEFELYKVREINDYHHTHDAYLNAVIGKALLGVYPQLEPEFVYGDYPHFHGHKENKATAKKFFYSNIMNFFKKDDVRTDKNGEIIWKKDEHISNIKKVLSYPQVNIVKKVEEQTGGFSKESILPKGNSDKLIPRKTKKFYWDTKKYGGFDSPIVAYSILVIADIEKGKSKKLKTVKALVGVTIMEKMTFERDPVAFLERKGYRNVQEENIIKLPKYSLFKLENGRKRLLASARELQKGNEIVLPNHLGTLLYHAKNIHKVDEPKHLDYVDKHKDEFKELLDVVSNFSKKYTLAEGNLEKIKELYAQNNGEDLKELASSFINLLTFTAIGAPATFKFFDKNIDRKRYTSTTEILNATLIHQSITGLYETRIDLSKLGGD

SEQ ID NO: 736 - protein, 1345 aa, Streptococcus mutans; identical to SEQ ID NO: 735

SEQ ID NO: 737 - protein, 1345 aa, Streptococcus mutans
MKKPYSIGLDIGTNSVGWSVVTDDYKVPAKKMKVLGNTDKSHIEKNLLGALLFDSGNTAEDRRLKRTARRRYTRRRNRILYLQEIFSEEMGKVDDSFFHRLEDSFLVTEDKRGERHPIFGNLEEEVKYHENFPTIYHLRQYLADNPEKVDLRLVYLALAHIIKFRGHFLIEGKFDTRNNDVQRLFQEFLAVYDNTFENSSLQEQNVQVEEILTDKISKSAKKDRVLKLFPNEKSNGRFAEFLKLIVGNQADFKKHFELEEKAPLQFSKDTYEEELEVLLAQIGDNYAELFLSAKKLYDSILLSGILTVTDVGTKAPLSASMIQRYNEHQMDLAQLKQFIRQKLSDKYNEVFSDVSKDGYAGYIDGKTNQEAFYKYLKGLLNKIEGSGYFLDKIEREDFLRKQRTFDNGSIPHQIHLQEMRAIIRRQAEFYPFLADNQDRIEKLLTFRIPYYVGPLARGKSDFAWLSRKSADKITPWNFDEIVDKESSAEAFINRMTNYDLYLPNQKVLPKHSLLYEKFTVYNELTKVKYKTEQGKTAFFDANMKQEIFDGVFKVYRKVTKDKLMDFLEKEFDEFRIVDLTGLDKENKVFNASYGTYHDLCKILDKDFLDNSKNEKILEDIVLTLTLFEDREMIRKRLENYSDLLTKEQVKKLERRHYTGWGRLSAELIHGIRNKESRKTILDYLIDDGNSNRNFMQLINDDALSFKEEIAKAQVIGETDNLNQVVSDIAGSPAIKKGILQSLKIVDELVKIMGHQPENIVVEMARENQFTNQGRRNSQQRLKGLTDSIKEFGSQILKEHPVENSQLQNDRLFLYYLQNGRDMYTGEELDIDYLSQYDIDHIIPQAFIKDNSIDNRVLTSSKENRGKSDDVPSKDVVRKMKSYWSKLLSAKLITQRKFDNLTKAERGGLTDDDKAGFIKRQLVETRQITKHVARILDERFNTETDENNKKIRQVKIVTLKSNLVSNFRKEFELYKVREINDYHHAHDAYLNAVIGKALLGVYPQLEPEFVYGDYPHFHGHKENKATAKKFFYSNIMNFFKKDDVRIDKNGEIIWKKDEHISNIKKVLSYPQVNIVKKVEEQTGGFSKESILPKGNSDKLIPRKTKKFYWDTKKYGGFDSPIVAYSILVIADIEKGKSKKLKTVKALVGVTIMEKMTFERDPVAFLERKGYRNVQEENIIKLPKYSLFKLENGRKRLLASARELQKGNEIVLPNHLGTLLYHAKNIHKVDEPKHLDYVDKHKDEFKELLDVVSNFSKKYTLAEGNLEKIKELYAQNNGEDLKELASSFINLLTFTAIGAPATFKFFDKNIDRKRYTSTTEILNATLIHQSITGLYETRIDLSKLGGD

SEQ ID NO: 738 - protein, 1345 aa, Streptococcus mutans; identical to SEQ ID NO: 737

SEQ ID NO: 739 - protein, 1355 aa, Streptococcus mutans
MKKSYSIGLDIGTNSVGWAVVTDDYKVPAKKMKVLGNTDKSHIKKNLLGALLFDSGNTAEDRRLKRTARRRYTRRRNRILYLQEIFSEEMGKVDDSFFHRLDESFLTDDDKNFDSHPIFGNKAEEDAYHQKFPTIYHLRKHLADSTEKADLRLVYLALAHMIKFRGHFLIEGELNAENTDVQKLFADFVGVYDRTFDDSHLSEITVDASSILTEKISKSRRLEKLINNYPKEKKNTLFGNLIALSLGLQPNFKTNFKLSEDAKLQFSKDTYEEDLEELLGKIGDDYADLFTLAKNLYDAILLSGILTADDSSTKAPLSASMIKRYAEHHEDLEKLKEFIKANKPELYHDIFKDETKNGYAGYIENGVKQDEFYKYLKNTLSKIAGSDYFLDKIEREDFLRKQRTFDNGSIPHQIHLQEMHAILRRQGDYYPFLKENQDRIEKILTFRIPYYVGPLARKNSRFAWAEYHSDEAVMPWNFDQVIDKESSAQAFIEHMTNNDLYLPNEKVLPKHSPLYEKYTVYNELTKIKYVTEIGEAKFFDANLKQEIFDGLFKHERKVTKKKLRTFLDKNFDEFRIVDIQGLDKETETFNASYATYQDLLKVIKDKVFMDNPENAEILENIVLTLTLFEDREMIKQRLAKYADVFDKKVIDQLARRHYTGWGRLSAKLLNGIRDKQSCKTIMDYLIDDAQSNRNLMQLITDDNLTFKDDIVKAQYVDNSDDLHQVVQSLAGSPAIKKGILQSLKIVDELVKVMGKEPEQIVVEMARENQTTAKGRRNSQQRYKRLKEAIKSLDRDLNHKILKEHPTDNQALQNNRLFLYYLQNGRDMYTGESLDINRLSDYDIDHVIPQAFIKDNSIDNRVLTSSKANRGKSDDVPSEDVVNRMRPFWNKLLSSGLISQRKYNNLTKKELTPDDKAGFIKRQLVETRQITKHVARMLDERFNKEFDDNNKRIRRVKIVTLKSNLVSSFRKEFELYKVREINDYHHAHDAYLNAVVVKALLVKYPKLEPEFVYGEYPKYNSYRERKTATQKMFFYSNIMNMFKSKVKLADDQIVERPMIEVNDETGEIAWDKTKHITTVKKVLSYPQVNIVKKVEEQTIGQNGGLFDDNPKSPLEVIPSKLVPLKKALNPEKYGGYQKPTTAYPILLIVDTKQLIPISVMDKKRFEQNPVKFLKDKGYQQIEKNNFVKLPKYTLVDIGNGIKRLWASSKEVHKGNQLVVSKKSQDLLYHAHHLDNDYSNEYVKNHYQQFDILFNEITSFSKKCKLGKEHIQKIEEAYSKERDSASIEELADGFIKLLGFTQLGATSPFSFLGIKLNQKQYTGKKDYLLPCMEATLIHQSITGLYETRIDLNKLGGD

SEQ ID NO: 740 - protein, 1355 aa, Streptococcus mutans; identical to SEQ ID NO: 739

SEQ ID NO: 741 - protein, 1125 aa, Streptococcus mutans
MTNGKILGLDIGIASVGVGIINAKTGNVEHASSRIFPAANADNNVERRSARGGRRLIRRKKHRLKRVEDLFEKYNIDTDFSNLNLNPYQLRVKGLNEQLSNEELFAILKNIAKRRGISYLDDAEDDSVGSSDYAKAIDENRKLLKKQTPGEIQLKRLEKYGQLRGNFTIQDENGEYHRLINVFSTSDYVKEARRILETQSYYNKFITESFVEDYIKILQGKRKYYVGPGNEKSRTDYGIYRTDGETLDNLFGILIGKCGFYPEEYRAAKASYTAQEYNFLNDLNNLTVPTETKKLSTEQKYQLVDFAKTASTLEAAKLLKEIAKLVGCQVEEIKGYRLDNKDKPDLHTFEPFRKLKSNLTTIAVENLSITTLDTLAHILTLNTEREGIEEAIQKELPNIFSDEQITGIIAVRKKNSQIFGKGWHSFSIKLMKELIPELYETSEEQMTILIRLKKVKTNSKITNRTKYINEQEVTDEIYNPVVSKSIRQTVKIINAAIKKYGAFDQIVIEMPRESNEEDERKFIADLQKSNAKEKDDAMKQAALLYNGKAELPHGVFHGHKELATKIRLWYQQGERCLYSGKHIDIHDLIHNQHMFEIDHVLPLSLSFDDSLANKVLVYSWANQEKGQRTPFQALPQMASAWSFRELRDYISKQKGISKKKRDYLLTEQDINKVEVKQKFIERNLVDTRYVSRVVLNTLQDALKVMNKETKISVIRGQFTSQLRRQWRIDKSRETYHHHAVDALIIAASSQLRLWKKQNNPMFAEDKHGQKINLDTGEVLSDDAYKELVYQAPYQGFVNTISSKSFEDEILFSYQVDSKVNRKISDATIYATRQAQLGKDKKEETYVLGKIKDIYSQAGYDAFRKKYDKDKAVFLMYQKDPETWEKVIEVILRDYKELDDKGKEIGNPFERYKVKHGFVRKYSRKNKGTEIKSLKYYDNKLGNHIDITPNNSKHSVVLQSINPWRADLYFNPETTKYELMGLKYADLSFEKGTGKYSISREKYDEIKEREGISSKSEFKFTLYKNDLILVKDIGNHKELIARFNSKNDTSKHYVELKPWNKAKFDSEEELIPAFGKVAKSGQFIKGLNKPDLSIYKVKTDILGHKYYIKKEGDKPKLNFENKIKNK

SEQ ID NO: 742 - protein, 1125 aa, Streptococcus mutans
MTNGKILGLDIGIASVGVGIINAKTGNVEHASSRIFPAANADNNVERRSARGGRRLIRRKKHRLKRVEDLFEKYNIDTDFSNLNLNPYQLRVKGLNEQLSNEELFAILKNIAKRRGISYLDDAEDDSVGSSDYAKAIDENRKLLKKQTPGEIQLKRLEKYGQLRGNFTIQDENGEYHRLINVFSTSDYVKEARRILETQSYYNKFITESFVEDYIKILQGKRKYYVGPGNEKSRTDYGIYRTDGETLDNLFGILIGKCGFYPEEYRAAKASYTAQEYNFLNDLNNLTVPTETKKLSTEQKYQLVDFAKTASTLGAAKLLKEIAKLVGCQVEEIKGYRLDNKDKPDLHTFEPFRKLKSNLTTIAVENLSITTLDTLAHILTLNTEREGIEEAIQKELPNIFSDEQITEIIAVRKKNSQIFGKGWHSFSIKLMKELIPELYETSEEQMTILTRLKKVKTNSKITNRTKYINEEEITDEIYNPVVSKSIRQTVKIINATIKKYGAFDQIIIEMPRESNEEDERKFIADLQKSNAKEKDDAMKQAALLYNGKDELPHDVFHGHKELATKIRLWYQQGERCLYSGKHIDIHDLIHNQHMFEIDHVLPLSLSFDDSLANKVLVYSWANQEKGQRTPFQALPQMASAWSFRELRDYISKQKGISKKKRDYLLTEQDINKVEVKQKFIERNLVDTRYVSRVVLNTLQDALKVMNKETKISVIRGQFTSQLRRQWRIDKSRETYHHHAVDALIIAASSQLRLWKKQNNPMFAEDKHGQKINLDTGEVLSDDAYKELVYQAPYQGFVNTISSKSFEDEILFSYQVDSKVNRKISDATIYATRQAQLGKDKKEETYVLGKIKDIYSQAGYDAFRKKYDKDKAVFLMYQKDPETWEKVIEVILRDYKELDDKGKEIGNPFERYKVKHGFVRKYSRKNKGTEIKSLKYYDNKLGNHIDITPNNSKHSVVLQSINPWRADLYFNPETTKYELMGLKYADLSFEKGTGKYSISREKYDEIKEREGISSKSEFKFTLYKNDLILVKDIGNHKELIARFNSKNDTSKHYVELKPWNKAKFDSEEELIPAFGKVAKSGQFIKGLNKPDLSIYKVKTDILGHKYYIKKEGDKPKLNFENKIKNK

SEQ ID NO: 743 - protein, 1125 aa, Streptococcus mutans; identical to SEQ ID NO: 742

SEQ ID NO: 744 - protein, 1125 aa, Streptococcus mutans; identical to SEQ ID NO: 741

SEQ ID NO: 745 - protein, 670 aa, Streptococcus oralis
MAKFNKNYSIGLDIGVSSVGYAVVTEDYRVPAFKFKVLGNTEKEKIKKNLIGSTTFVPAQSAQGTRVFRVNRRRIDRRNHRIAYLRDIFQKEIGKIDKNFYRRLDESFRVLGDKSEDIQIKQPFFGNKELETAYHKKYPTIYHLRKHLADADKNSPVADIREVYMALSHIFKYRGHFLTLGKIDPNNINMQNSWIDFIESCQDAFDLEISDESKTIAAIFKSSDNRQEKVKGILSYFQPELAKKDKSIFKQLLQLLFGLKTKFKECFELEEEPDLNFSKENYDENLENLLGTLEEDFPDVFAKLKILRDTILLSDMLTYTGATHARFSATMVERYEEHRKDLQRFKSFVKQNLSEQDYLDIFGRKTPNGFDVDKETKGYVGYISNKMVLTNKQKTIQQNFYDYISGKITGIEGAEYFLNKISDGTFLRKLRTTDNGTIPNQIHAYELEKIIERQGRDYPFLLENKDKLLSILTFKIPYYVGPLAKGNNSRFAWIKRTTSQDVLDNNDEDTKNGKIRPWNYHKLINMDETRDAFITNLIGNDIILLNEKVLPKRSLIYEEVMLQNELTRIKYKDKYGKIHFFDSELRQEIINNLFKTNSKRVSSAMLLAYLENFTNLQAVEIVSGIEKGKSLNSTLKTYNDLKTIFSEDLLDSEIYQKELEEIIKVITVFV

SEQ ID NO: 746 - protein, 1373 aa, Streptococcus oralis
MENKNYSIGLDIGTNSVGWAVITDDYKVPSKKMKVLGNTDKRFIKKNLIGALLFDEGTTAEARRLKRTARRRYTRRKNRLRYLQEIFAEEMSKVDSSFFHRLDDSFLIPEDKKGSKYPIFATLIEEKEYHKQFPTIYHLRKQLADSKEKTDLRLIYLALAHMIKYRGHFLYEDTFDIKNNDIQKIFNEFISIYNNTFEGNSLSGQNVQVEAIFTDKISKSAKRERVLKLFPDEKSTGLFSEFLKLIVGNQADFKKHFDLEEKAPLQFSRDTYDEDLENLLGQIGDDFADLFVAAKKLYDAILLSGILTVTDPSTKAPLSASMIERYENHQKDLATLKQFIKTNLPEKYDEVFSDQSKDGYAGYIDGKTTQESFYKYIKNLLSKFEGADYFLEKIEREDFLRKQRTFDNGSIPHQIHLQEMNAILRRQGEHYPFLKENKEKIEKILTFRIPYYVGPLARGNRDFAWLTRNSDQAIRPWNFEEIVDKASSAESFINKMTNYDLYLPEEKVLPKHSLLYETFAVYNELTKVKFIAEGLRDYQFLDSRQKKDIFYTLFKAEDKRKVTEKDIIQYLHTVDGYDGIELKGIEKQFNASLSTYHDLLKIIKDKEFMDDPNNEEILENIVHTLTIFEDREMIKQRLAQYDSLFDEKVIKALTRRHYTGWGKLSSKLINGIRDKQTGKTILDYLMDDGYNNRNFMQLINDDELSFKEIIKKAQVVGKTDDVKQVVQELPGSPAIKKGILQSIKLVDELVKVMGHEPESIVIEMARENQTTARGKKNSQQRYKRIEDSLKILASGLNAKILKEHPTDNIQLQNDRLFLYYLQNGRDMYTGKPLDINQLSSYDIDHIVPQAFIKDDSLDNRVLTSLKDNRGKSDNVPSLEVVEKMKTFWQQLLDSKLISYRKFNNLTKAERGGLDERDKVGFIKRQLVETRQITKHVAQILDARYNTEVNEKDKKNRTVKIITLKSNLVSNFRKEFRLYKIREINDYHHAHDAYLNAVVAKAILKKYPKLEPEFVYGDYQKYDLKRYISRSKDPKEIEKATEKYFFYSNLLNFFKEEVHYADGTIVKRENIEYSKDTGEIAWNKEKDFATIKKVLSLPQVNIVKKREVQTGGFSKESILPKGNSDKLIPRKTKDILWDTTKYGGFDSPVIAYSILLIADIEKGKAKRLKTVKTLVGITIMEKATFEKSPIAFLENKGYHNVRKENILCLPKYSLFELKNGRRRMLASAKELQKGNEIVLPVHLTTLLYHAKNIHRLDEPEHLEYIQKHRNEFKGLLNLVSEFSQKYVLADANLEKIKNLYADNEQADIEILANSFINLLTFTALGAPAAFKFFGKDVDRKRYTTVSEILNATLIHQSITGLYETRIDLSKLGED

SEQ ID NO: 747 - protein, 1371 aa, Streptococcus oralis
MENKNYSIGLDIGTNSVGWSVITDDYKVPSKKMKVLGNTDKRFIKKNLIGALLFDEGTTAEARRLKRTARRRYTRRKNRLRYLQEIFAEEMSKVDSSFFHRLDDSFLIPEDKRGSKYPIFATLAEEKEYHKQFPTIYHLRKQLADSKEKTDLRLIYLALAHMIKYRGHFLYEDTFDIKNNDIQKIFSEFISIYDNTFEGSSLSGQNAQVEAIFTDKISKSAKRERVLKLFPDEKSTGLFSEFLKLIVGNQADFKKHFDLGEKAPLQFSKDTYDEDLENLLGQIGDDFADLFLVAKKLYDAILLSGILTVTDPSTKAPLSASMIERYENHQKDLAVLKQFIKNNLPEKYDEVFSDQSKDGYAGYIDGKTTQEAFYKYIKNLLSKFEGTDYFLEKIEREDFLRKQRTFDNGSIPHQIHLQEMNAILRRQGEHYPFLKDNKEKIEKILTFRIPYYVGPLARGNRDFAWLTRNSDEAIRPWNFEEIVDKASSAEDFINKMTNYDLYLPEEKVLPKHSLLYETFAVYNELTKVKFIAEGLRDYQFLDSGQKKQIVTQLFKEKRKVTEKDIIQFLHNVDGYDGIELKGIEKQFNASLSTYHDLLKIIKDKEFMDDSKNEEILENIVHTLTIFEDREMIKQRLAQYDSLFDEKVIKALIRRHYTGWGKLSAKLIDGICDKQTGNTILDYLIDDGKNNRNFMQLINDDGLSFKEITQKAQVVGKTDDVKQVVQELPGSPAIKKGILQSIKIVDELVKVMGHTPESIVIEMARENQTTARGKKNSQQRYKRIEDALKNLASGLDSNILKEHPTNNIQLQNDRLFLYYLQNGRDMYTGKPLDINQLSSYDIDHIVPQAFIKDDSLDNRVLTSLKDNRGKSDNVPSIEVVQKRKAFWQQLLDSKLISERKFNNLTKAERGGLDERDKVGFIKRQLVETRQITKHVAQILDARFNKEVNEKDKKNRTVKIITLKSNLVSNFRKEFRLYKVREINDYHHAHDAYLNAVVAKAILKKYPKLEPEFVYGDYQKYDLKRYISRSRNPKEVEKATEKYFFYSNLLNFFKEEVHYADGTIVKRENIEYSKDTGEIAWNKEKDFATIKKVLSYPQVNIVKKREVQTGGFSKESILPKGNSDKLIPRKTKDILWETTKYGGFDSPVIAYSILLIADIEKGKAKKLKTVKTLVGITIMEKAAFEENPITFLENKGYHNVRKENILCLPKYSLFELENGRRRLLASAKELQKGNEIVLPVYLTTLLYHSKNVHKLDEPEHLEYIQKHRNEFKDLLNLVSEFSQKYVLADANLEKIQNLYADNEQADIEILANSFINLLTFTALGAPAAFKFFGKDIDRKRYTTVSEILNATLIHQSITGLYETRIDLSKLGED

SEQ ID NO: 748 - protein, 1121 aa, Streptococcus oralis
MNGLVLGLDIGIASVGVGILEKNSGKIIHANSRLFPAATADNNVERRKNRQARRLNRRKKHRGVRFQDLFEDYGLLTDFSKVSINLNPYRLRVDGLNQQLTNEELFIALKNIVKRRGISYLDDASEDGGAVSSDYGKAVEENRKLLAEQTPGQIQLERFEKYGQVRGDFTVVENGEKCRLINVFSTSAYRKEAEKILRKQQEFNNQITDEFIEDYLKILTGKRKYYHGPGNEKSRTDYGRFRTDGTTLDNIFGVLIGKCTFYPNEYRASKSSYTAQEFNLLNDLNNLTVPTETKKLSEEQKKVIVEYAKEAKTLGASTLLKYIVKMIDASVDQISGYRVDVNNKPEMHTFEVYRKMQSLETISVGELSRNVLDELAHILTLNTEREGIEEAINSKLMGVFSQDQVLELVQFRKNNSSLFSKGWHNFSLKLMMELIPELYETSEEQMTILTRLGKQKSKETSKRTKYIDEKELTEEIYNPVVAKSVRQAIKIINEATKKHGIFDNIVIEMARENNEEDAKKDYIKRQKANQDEKNAAMEKAAFQYNGKKELPGNIFNGHKELATKIRLWHQQGEKCLYTGKTIPISDLIHNQYKYEIDHILPLSLSFDDSLSNKVLVHATANQEKGQRTPFQALDSMDDAWSYREFKSYVKDLKSLSNKKKDYLLTEEDISKIEVKQKFIERNLVDTRYSSRVVLNALQDFYKSHQFDTTISVVRGQFTSQLRRKWGLEKSRETYHHHAVDALIIAASSQLRLWKKQNNPLITYKEGQFVDSQTGEIISLTDDEYKELVFKAPYDHFVDTLHSKTFEDGILFSYQVDSKYNRKISDATIYATRKAKLDKDKSEETYVLGKIKDIYSQAGYDAFIKIYNKDKRKFLMYHKDPQTFEKVIEEILRTYPSKERNDKNKEVPCNPFEKYRQENGPIRKYSKKGNGPEIKCLKYYDNKLGNYIDISPDGSDNQVVLQSLKPWRTDVYFNHQTKEYELMGLKYSDLSFEKGSGKYSISNEKYNSIKRIEGVNEQSEFKFTLYKNDLILIKDSENNEQKLFRFNSRNDTAKHYVELKPYDKARFDGQQELITILGNVAKGGQCLKGLNKSNISIFKVKTDVLGKKHIIKKEGDEPKLKF

SEQ ID NO: 749 - protein, 1134 aa, Streptococcus oralis
MNGLVLGLDIGIASVGVGILEKNSGKIVHASSRIFPAATADNNVERRKNRQARRLHRRKKHRGARLKDLFEYYGLLTDFSKVSINLNPYRLRVDGLDQQLTNEELFIALKNIVKRRGISYLDDASEDGGTVSSDYGKAVEENRKLLAEQTPGQIQLERFEKYGQLRGDFTVVENSEKCRLINVFSTSAYKKEAERILRKQQEFNNQITDEFIEDYLKILTGKRKYYHGPGNEKSRTDYGRFRTDGATLDNIFGILIGKCTFYPNEYRASKASYTAQEFNLLNDLNNLTVPTETKKLSEEQKKTIIEYAKSAKTLGASTLLKYIAKMIDASVDQIRGYRVDVNNKPEMHTFEVYRKMQSLETISVGELSRNILDELAHILTLNTEREGIEEAINTKLRDSFSQDQVLELVQFRKNNSSLFSKGWHNFSLKLMMELIPELYETSEEQMTILTRLGKQKSKETSKRTKYIDEKEVTEEIYNPVVAKSVRQAIKIINEATKKHGIFDNIVIEMARENNEEDAKKDYIKRQKANQDEKYAAMEKAAFQYNGKKELPDNIFHGHKELATKIRLWHQQGEKCLYTGKSIPISDLIHNQYKYEIDHILPLSLSFDDSLSNKVLVLATANQEKGQRTPFQALDSMDDAWSYREFKSYVKESKLLGNKKKEYLLTEEDISKIEVKQKFIERNLVDTRYSSRVVLNALQDFYKNHNFDTTISVVRGQFTSQLRRKWGLEKSRETYHHHAVDALIIAASSQLRLWKKQNNPLIAYKEGQFVDSQTGEIISLTDDEYKELVFKAPYDHFVDTLSSKTFEDSILFSYQVDSKFNRKISDATIYATRKAKLDKEKKEYTYTLGKIKDIYSLGTKTPSKTGFYKFLDLYNKDKSQFLMFQKDRKTWDEVIEKIMEQYRPFKEYDKAGKLVDFNPFEKYRQENGPIRKYSKKGNGPEIKSLKYYDILLGKHKNITPEGSRNTVALLSLNPWRTDVYYNMETKKYEFLGLKYADLPFEEGGAYGISTETYNELREKEGIGKNSEFKFTLYKNDLILIKDTETNCQQFFRFWSRTGKDNPKSFEKHKIELKPYEKAKFEKGEELEVLGKVPPSSNQFQKNMQIENLSIYKVKTDVLGNKHFIKKEGDKPKLKF

SEQ ID NO: 750 - protein, 550 aa, Streptococcus oralis
MYSLDKNGSPTPLYRDQLNQYEVDHIIPYSFLPIDSIDNKVLTHRENNQRKLDNIPDKETVANMKPFWEKLYNAKLISQTKYQRLTTSERTPDGVLTESMKAGFIERQLVETRQIIKHVARILDNRFSDTKIITLKSQLVTNFRNTFHIAKIRELNDYHHAHDAYLAVVVGQTLLKAYPKLAPELIYGHHAHFNRHEENKATIRKYLYSNIMRFFNNPDSKVSKDIWDCNRDLPIIKDIIYNSQVNFVKRTMIKKGAFYNQNPVGKFNKQIAANNRYPLKTKVSSLDTSIYGGYGPMNSALSIIIIAERFNEKKCKIETVKEFHDIFIIDYKKFNNDPFQFLNDTSENGFLKKNNINRVLAFYRVPKYSLMQKIDGTRMLFESKSNLHKATQFKLTKTQNELFFHMRRLLTKSNLMDLKSESAIKESQNFILKHKEEFDNISNQLSAFSQKMLGDTTSLKNLIKGYNERKIKEINSSEETIKYFYDNFIKMFSFVKSGAPKDINDFFNNKYTVARMRPKPDKKLLNATLIHQSITGLYETRIDLSKLGED

SEQ ID NO: 751 - protein, 1140 aa, Streptococcus parasanguinis
MNGLVLGLDIGIASVGVGILKKDIGEIIHTNSRLFSAATADSNIERRGHRGGKRLTRRKKHRSIRLHDLFEDFGLLTDFSKVSINLNPYQLRVQGLDNQLTNEELFIALKNIVKRRGISYLDDASEDGGTVSSDYGKAVEENRKLLAEQTPGQIQLDRFEKYGQVRGDFNVVENGEKRRLINVFTTSAYSKEAERILRKQQEFNKKITDEFIEDYLTILTGKRKYYHGPGNEKSRTDYGRYTTKKDPEGKYITLDNIFGILIGKCTFYPDEYRASKASYTAQEFNLLNDLNNLTVPTETKKLSEEQKKTIIKYAKTAKTLGASTLLKYIAKLIGASVDQIHGYRIDPNKKPEMHTFETYRKMQSLETISVEELPRKVLDELAHILTLNTEREGIEEAINATLKDTFSQDQVLELVQFRKNNSSLFSKGWHSFSLKLMMELIPELYETSEEQMTILTRLGKQKSKETSKRTKYIDEKELTEEIYNPVVAKSVRQAIKIINEATKKYGIFDNIVIEMARENNEEDAKKEYIKRQKANLDEKNAAMEKAAFQYNGKKELPDNVFHGHKELATKIRLWHQQGEKCLYTGKNIPISDLIQNQYKYEIDHILPLSLSFDDSLSNKVLVLATANQEKGQRTPFQALDSMDDAWSYREFKSYVKDSKLLGNKKKEYLLTEEDISKIEVKQKFIERNLVDTRYSSRVVLNALQDFYKEHQFDTTISVVRGQFTSQLRRKWGLEKSRETYHHHAVDALIIAASSQLRLWKKQNNPLISYTEGQFVDQVTGEIISLSDDEYKELVFKAPYDHFVDTLKSKKFEDSILFSYQVDSKYNRKISDATIYATRKAKLDKENKEYTYTLGKIKDIYALGTKSPSKTGFYKFLDLYNKDKSQFLMFQKDRKTWDEVIEKIIEQYRPFKEYDENGKEVDFNPFEKYRIENGPIRKYSKKGNGPEIKSLKYYDNLLGKFVDITPSESKNPVALLSLNPWRTDVYYNTETSKYEFLGLKYADLCFEKGGAYGISEVKYNKIREKEGIGKESEFKFTLYKNDLILIKDTETNCQQIFRFWSRTGKDNPKSFEKHKIELKPYEKARFEKGEELEVLGKVPPSSNQLQKNMQIENLSIYKVKTDVLGNKHFIKKEGEEPKLKF

SEQ ID NO: 752 - protein, 1374 aa, Streptococcus pseudoporcinus
MKKRYSYSIGLDIGTNSVGWAVINEDYKVPAKKMTVFGNTDRKTIKKNLLGTVLFDSGETAQARRLKRTNRRRYTRRRYRLCQLQNIFATEMVKVDDTFFQRLSESFFYYQDKAFDKHPIFGNSKEERAYHKTYPTIYHLRKDLADRDQKADLRLIYLALSHIIKFRGHFLIEGKLNSENTDVQKLFIALVTVYNLLFEEEPIAGETCDAKALLTAKTSKSKRLESLISEFPGQKKNGLFGNLLALALGLRPNFKSNFGLSEDAKLQITKDTYEEELDNLLAEIGDHYADLFLAAKNLSDAILLSDILTLSDENTRAPLSASMIKRYEEHQEDLALLKKLVKEQMPEKYWEIFSNAKKNGYAGYIEGKVSQEDFYRYIKPILSRLKGGDEFLAKIDRDDFLRKQRTFDNGSIPHQIHLKELHAILRRQEKYYPFLAEQKEKIEQLLCFRIPYYVGPLAKGGNSSFAWLKRRSDEPITPWNFKDVVDEEASAQAFIEGMTNYDTYLPEEKVLPKHSPLYEMFTVYNELTKVKYIAENMTKPLYLSAEQKEAIIDHLFKQTRKVTVKDLKEKYFSQIEGLENVDVTGVEGAFNASLGTYNDLLKIIKDKAFLDDEANAEILEEIVLILTLFQDEKLIEKRLAKYANLFEKSVLKKLRKRHYRGWGRLSRQLIDGMKDKASGKTILDFLKADDFANRNFIQLINDSSLDFEKLIDDAQKKAIKRESLTEAVANLAGSPAIKKGILQSLKVVDEIVKVMGHNPDNIVIEMSRENQTTAQGLKNARQRLKKIKEVHKKTGSRILEDNSERITNLTLQDNRLYLYLLQDGKDMYTGQDLDINNLSQYDIDHIIPQSFIKDNSIDNLVLTTQKANRGKSDNVPSIEVVRDMKDRVWRRQLANGAISRQKFDHLTKAERGGLADSDKARFLRRQLVETRQITKHVAQLLDSRFNSKSNQNKKLARNVKIITLKSKIVSDFRKDFGLYKLREVNNYHHAHDAYLNAVVGTALLKKYPKLEAEFVYGDYKHFDLVKLISKSDPSLGKATAKVFFYSNIMNFFKEELSLADGTLMKRPVIETNTETGEVVWDKVKDFKTIRKVLSYPQVNIVKKTEIQSGAFSKESVLSKGNSDKLIERKKGWDPKKYGGFDSPNTAYSIFVVAKVAKRKAQKLKTVKEIVGITIMEQAEYEKDNIAFLEKKGYQDIQEKLLIKLPKYSLFELENGRRRLLASANEFQKGNELALSGKYMKFLYLASRYDKLSSKIESEQQKKLFVEQHLHYFDEILDIVVKHATCYIKAENNLKKIISLYKKKEAYSINEQALNMLNLFIFTSLGAPSTFVFFDETIDRKRYTTSSDVLNGILIQQSITGLYETRIDLSRFGGD

SEQ ID NO: 753 - protein, 1052 aa, Streptococcus pyogenes
LSASMIKRYDEHHQDLTLLKALVRQQLPEKYKEIFFDQSKNGYAGYIDGGASQEEFYKFIKPILEKMDGTEELLAKLNREDLLRKQRTFDNGSIPHQIHLGELHAILRRQEDFYPFLKDNREKIEKILTFRIPYYVGPLARGNSRFAWMTRKSEETITPWNFEEVVDKGASAQSFIERMTNFDKNLPNEKVLPKHSLLYEYFTVYNELTKVKYVTEGMRKPAFLSGEQKKAIVDLLFKTNRKVTVKQLKEDYFKKIECFDSVEISGVEDRFNASLGTYHDLLKIIKDKDFLDNEENEDILEDIVLTLTLFEDREMIEERLKTYAHLFDDKVMKQLKRRRYTGWGRLSRKLINGIRDKQSGKTILDFLKSDGFANRNFMQLIHDDSLTFKEDLQKAQVSGQGDSLHEHIANLAGSPAIKKGILQTVKVVDELVKVMGRHKPENIVIEMARENQTTQKGQKNSRERMKRIEEGIKELGSDILKEYPVENTQLQNEKLYLYYLQNGRDMYVDQELDINRLSDYDVDHIVPQSFLKDDSIDNKVLTRSDKNRGKSDNVPSEEVVKKMKNYWKQLLNAKLITQRKFDNLTKAERGGLSELDKAGFIKRQLVETRQITKHVAQILDSRMNTKYDENDKLIREVRVITLKSKLVSDFRKDFQFYKVREINNYHHAHDAYLNAVVGTALIKKYPKLESEFVYGDYKVYDIRKMIAKSEQEIGKATAKYFFYSNIMNFFKTEITLANGEIRKRPLIETNGETGEIVWDKGRDFATVRKVLSMPQVNIVKKTEVQTGGFSKESILPKRNSDKLIARKKDWDPKKYGGFDSPTVAYSVLVVAKVEKGKSKKLKSVKELVGITIMERSSFEKDPVDFLEAKGYKEVRKDLIIKLPKYSLFELENGRKRMLASAGELQKGNELALPSKYVNFLYLASHYEKLKGSPEDNEQKQLFVEQHKHYLDEIIEQISEFSKRVILADANLDKVLSAYNKHRDKPIREQAENIIHLFTLTNLGAPAAFKCFDTTIGRNRYKSIKEVLDATLIHQSITGLYETRIDLSQLGGD

SEQ ID NO: 754 - protein, 1368 aa, Streptococcus pyogenes; identical to SEQ ID NO: 42

SEQ ID NO: 755 - protein, 1367 aa, Streptococcus pyogenes; identical to SEQ ID NO: 246

SEQ ID NO: 756 - protein, 1368 aa, Streptococcus pyogenes [sequence omitted]

SEQ ID NO: 757 - protein, 1370 aa, Streptococcus ratti
MKKPYSIGLDIGTNSVGWAVITDDYKVPAKKMKVLGNTDKNYIKKNLLGALLFDSGNTAEDRRLKRTARRRYTRRRNRLLYLQDIFSDEMNKVDESFFHRLEDSFLVSEDKRGDHHPIFGNVVDEVKYHEQFPTIYHLRKYLADTPEKADLRLVYLALAHMIKFRGHFLIDDPKLDVKNTDSQELFSQFLTAYDVTQEDSHLADVKINISDIITEKMNKSRKVEALLFHFPSQKKNSFFGNLVSLVFGLLPNFKTNFNLAEDAKLQLSKDSYDEDLENLLGQIGDEYTDVFVAARKLYDSILLSGILTVNDLSTKAILSASMVRRYEEHNKDLAKLKAFVKANFTHDVFKEVFSDASKNGYAGYIEGKTSQEDFYKYVKNLIGKVDGSADFIEKIDREDFLRKQRTFDNGSIPHQVHLAEMKAILRRQGEYYPFLKEHAEKIQQILTFRIPYYVGPLDRHGHSDFAWASFNSEEKVTPWNFEEIIDKNKSAQAFIERMTNQDLYLPNEKVLPKHSPLYEKYTVYNELTKIKYVTETGTAKFFDANLKQEIFDGLFKKERKVTKRKLLTFLEKNFDEFRIVDIQGLDKETETFNASYGIYQDLLKIIKDKAFMDDSENADILEDIVLTLTLFEDREMIKQRLAKYADLFDKKVIDNLARRRYTGWGRLSAKLLNGIRDKRSRKTIMDYLVDDGRSNRNLMQLITDDNLTFKDEIAKAQYSDNSDDLHQVVQDLAGSPAIKKGILQSVKIVDELVKVMGYEPEQIVVEMARENQTTAKGRRNSQQRYKRLEEAIKNLDRDLNYKILKEHPTDNQALQNDRLFLYYLQNGRDMYTGESLDINRLSDYDIDHIIPQAFIKDNSIDNRVLVSSAKNRGKSDDVPSEDVVNRMRPFWNKLLNCGLISQRKYSNLTKKELTPNDKAGFIKRQLVETRQITKHVARILDEHFNKEFDEDKKRIRKVKVVTLKSNLVSNFRKEFELYKVREINDYHHAHDAYLNAVVAKALLMKYPKLEPEFVYGEYPKYNSYRERKTATQRMFFYSNIMNMFKSKVKLADERIIERPMIEVNDETGEIAWDKTKHIATVKKVLSYPQINIVKKVEEQTGGLTNETIYPRGSFDKLLNRKNTLEASKYGGFGSPTVAYCVLVVADSKNENGKVKKLKLGSELLGITILEKNDFENNSLDFLSRKGYQGVQEKKIIKLPKYSLFEFQDGSRRMLSSVMANDNKRGDLQKANEMILPAYLVKLLYHAKHINSVGEPAHKNYINEHCSEFQDLLNYIRQFADKFVDVDKNLSKIRSLSKSMAEYSVSEICSSFVNLLTLTALGAPADFKFFGTTIPRKRYGSPQSILSATLIHQSITGLYETRIDLSKLGED

SEQ ID NO: 758 - protein, 1135 aa, Streptococcus salivarius
MSDLVLGLDIGIGSVGVGILNKVTGEIIHKNSRIFPAAQAENNLERRTNRQGRRLTRRKKHRRVRLNHLFEESGLITDFTKVSINLNPYQLRVKGLTAELSNEELFIALKNMVKHRGISYLDDASDDGNSSVGDYAQIVKENSKQLETKTPGQIQLERYQKYGQLRGDFTVEEDGRKHRLINVFPTSAYHAEALRILQTQQEFNPQITDEFINSYLEILTGKRKYYHGPGNEKSRTDYGKYTTKKDAQGQYITLNNIFGILIGKCTFYPEEYRAAKASYTAQEFNLLNDLNNLTVPTETKKLSEEQKYQIITYVKNEKAMGPAKLFKYIAKLLACDIADIKGYRIDKSDKAEIHTFEAYRKMKTLETIDIEQIEREKLDKLAYVLTLNTEREGIQEALDHEFADGTFSQEQVDELVQFRKANSSIFGKGWHSFSVKLMMELIPELYATSEEQMTILTRLGKQKTTSSSNKTKYIDEKQLTEEIYNPVVAKSVRQAIKIVNAAIKKYGDFDNIVIEMARETNEDDEKKAIQKIQKANKAEKDAAMRKAANQYNGKAELPHSVFHGHKQLATKIRLWHQQGERCLYTGKTISIHDLINNPNQFEIDHILPLSITFDDSLANKVLVYATANQEKGQRTPYQALDSMDDAWSFRELKAFVRESKALSNKKKEYLLTEEDISKFDVRKKFIERNLVDTRYASRVVLNALQEHFKAHKIDTKVSVVRGQFTSQLRRHWGIDKTRDTYHHHAVDALIIAASSQLNLWKKQKNTLVSYSEDQLLDIETGELISDDEYKESVFKAPYQHFVDTLKSKEFEDSILFSYQVDSKFNRKISDATIYATRQAKVGKDKKDETYVLGKIKDIYALGTKTPSKTGFYKFLDLYNKDKSQFLVYQKDRKTWDEVIEKIMEQYRPFKESDKNGKEVDFNPFEKYRIENGPIRKYSRKGNGPEIKSLKYYASKLGNHIDITPKDSNNKVVLQSVSPWRADVYFNKTTGSYEILGLKYADLQFEKGTGTYRISEEKYNDIKKKEGVDSDSEFKFTLYKNDLLLIKDTETKEQRLFRFLSRSMPNKKHYVELKPYSKDKFEKNESLIEILGSADKSGRCIKGLAKSNLSIFKVRTDVLGNQHIIKNEGDKPKLDF

SEQ ID NO: 759 - protein, 1127 aa, Streptococcus salivarius
MSDLVLGLDIGIGSVGVGILNKVTGEIIHKNSRIFPAAQAENNVERRINRQGRRLTRRKKHRRVRLNHLFEESGLITDFTNVSINLNPYQLRVKGLTDELSNEELFIALKNMVKHRGISYLDDASDDGNSSVGDYAQIVKENSKQLETKTPGQIQLERYQKYGQLRGDFTVEEDGKKHRLINVFPTSAYRAEALRILQTQQEFNPQITDEFINSYLQILTGKRKYYHGPGNEKSRTDYGRYTTKKDSEDEYITLDNIFGILIGKCTFYPEEYRAAKASYTAQEFNLLNDLNNLTVPTETKKLSEEQKNQIITNVKNEKAMGPAKLFKYIAKLLSCDVADIKGYRIDKSDKAEIHTFEAYRKMKTLATIDIEQMERENLDKLAYVLTLNTEKEGIQEALEHEFADGTFSQEQIDELVQFRKANSSIFGKGWHSFSVKLMMELIPELYATSEEQMTILTRLGKQKTTSSSNKTKYIDEKQLTEEIYNPVAAKSVRQAIKIVNAAIKEYGDFDNIVIEMARETNEDDEKKAIQKIQKANKDEKDAAMLKAANQYNGKAELPHSVFHGHKQLATKIRLWHQQGERCLYTGKTISIHDLINNSNQFEIDHILPLSITFDDSLANKVLVYATANQEKGQRTPYQALDSMDDAWSFRELKAFVRDSKALSNKKKEYLLTEEDISKFDVRKKFIERNLVDTRYASRVVLNALQEHFRVHKTDTKVSVVRGQFTSQLRRHWGIEKTRDTYHHHAVDALIIAASSQLNLWKKQKNTLVSYSEDQLLDIETGELISDDEYKESVFKAPYQHFVDTLKSKEFEDSILFSYQVDSKFNRKISDATIYATRQAKVGKDKKDETYVLGKIKDIYSQTGYDAFIKIYKKDKSKFLMYRHDPQTFEKVIEPILENYPNKELNEKGKEVPCNPFLKYKEDHGYIRKYSKKGNGPEIKSLKYYDSKLGNHIDITPKNSNNKVVLQSVSPWRADVYFNKTTGKYEILGLKYADLKFEKGTGTYKISEEKYNDIKIKEGVDSDSEFKFTLYKNDLLLIKDTETKEQQLFRFLSRTMPNVKHYVELKPYDKQKFDDNEELIKILGIVAKGGQCKKGVSKPNISIYKIRTDVLGNQHIIKNEGDKPKLDF

SEQ ID NO: 760 - protein, 1385 aa, Streptococcus salivarius
MTKPYSIGLDIGTNSVGWAVITDDYKVPSKKMKVLGNTSKKYIKKNLLGALLFDSGITAEGRRLKRTARRRYTRRRNRILYLQEIFSTEMATLDDAFFQRLDDSFLVPDDKRDSKYPIFGNLVEEKVYHDEFPTIYHLRKHLADSSKKADLRLVYLALAHMIKYRGHFLIEGDFNSKNNDLQKNFQDFLDTYNAIFESDLSLENSKQLEEIVKDKISKSAKKDRILKLFPGEKNSGIFSEFLKLIVGNQADFRKYFNLDEKTSLQFSKESYDEDLETLLGHIGDDYSDVFLKAKKLYDAILLSGILTVTDNGTEAPLSSAMIMRYKEHEEDLALLKAYIRNISLETYNEVFKDNTKNGYAGYIDGKTSQEDFYVYLKRLLAGLEGADYFLEKIDREDFLRKQRTFDNGSIPYQIYLQEMRAILDKQAKFYPFLAKNKERIEKILTFRIPYYVGPLARGNSDFAWSIRKRNEKITPWNFEDVIDKESSAEAFINRMTSFDLYLPEEKVLPKHSLLYENFTVYNELTKVRFIAEGMRDYQFLDSKQKKDIVRLYFKGKRKVTDKDIIEYLHAIDGYDGIELKGIEKQFNSSLSTYHDLLNIINDKEFLDDSSNETIIEEIIHTLTMFEDREMIKQRLSKFDNIFDKSVLKKLSRRHYTGWGKLSAKLINGIRDEKSGNTILDYLIDDGVSNRNFMQLIHDDALSFKKKIKKAQIIGDKDNIKQVVKSLPGSPAIKKGILQSIKIVDELVKVMGREPESIVVEMARENQYTNQGKSNSQQRLKRLEESLKGLGSKILKENVPTRLSKIDNNALQNDRLYLYYLQNGKDMYTGEELDIDRLSNYDIDHIIPQAFLKDDSIDNKVLVSSASNRGKSDDVPSLEVVKKRKTLWYQLLKSKLISQRKFDNLTKAERGGLSQEEKAGFIQRQLVETRQITKHVARLLDERFNNKKDENNRTLRTVKIITLKSSLVSQFRKDFELYKVREINDFHHAHDAYLNAVVASALLKKYPKLEPEFVYGDYPKYNSFRERKSATEKVYFYSNIMNIFKKSIPLADGTVIDRPLIEVNEETGESVWNKVADLNTVRKVLSYSQVNIVKKVEEQNHGLDRGKPKGLFNANLSSKPKPNSKENLVGAKEYLDPKKYGGYAGISNSFAILVKGTIEKGAKKKITNVLEFQGISILDRIYYRKDKLNFLLEKGYKDIELIIELPKYSLFELSDGSRRMLASILSTNNKRGEIHKGNQIFISQKFVKLLYHAKRISSTFNENHRKYVENHKKEFEELFYYILEFNENYVGAKKNGELLKSAFQSWQNHSIDELCSSFIGPTGSERKGLFELTSRGGAADFEFLGVKIPRYRDYTPSSLLKDATLIHQSVTGLYETRIDLGKLGED

SEQ ID NO: 761 - protein, 1392 aa, Streptococcus sanguinis
MENKNYSIGLDIGTNSVGWAVITDDYKVPSKKMKVFGNTDKHFIKKNLIGALLFDEGATAEDRRLKRTARRRYTRRKNRLRYLQEIFSEEISKLDSSFFHRLDDSFLVPKDKRGSKYPIFATLEEEKEYHKKFPTIYHLRKHLADSKEKTDLRLIYLALAHMIKYRGHFLYEESFDIKNNDIQKIFNEFISIYDNTFEGSSLSGQNAQVEAIFTDKISKSAKRERVLKLFSDEKSTSLFSEFLKLIVGNQADFKKHFDLEEKAPLQFSKDTYDEDLENLLGQIGDGFTDLFLVAKKLYDAILLSGILTVTDPSTKAPLSASMIERYESHQKDLAALKQFIKNNLPKRYNEVFSDQSKDGYAGYIDGKTTQEAFYKYIKNLLSKFEGADYFLDKIEREDFLRKQRTFDNGSIPHQIHLQEMNAILRRQGEHYPFLKENREKIEKILTFRIPYYVGPLARGNRDFAWLTRNSDQAIRPWNFEEIVDKASSAEEFINKMTNYDLYLPEEKVLPKHSLLYETFAVYNELTKVKFIAEGLRDYQFLDSGQKKQIVNQLFKEKRKVTEKDIIHYLHNVDGYDGIELKGIEKQFNASLSTYHDLLKIIKDKEFMDDPKNEEILENIVHTLTIFEDREMIKQRLAQYDSIFDEKVIKALTRRHYTGWGKLSAKLINGICDKQTGDTILDYLIDDGKINRNFMQLINDDGLSFKEIIQKAQVVGKTDDVKQVVQELPGSPAIKKGILQSIKIVDELVKVMGYAPESIVIEMARENQTTARGKKNSQQRYKRIEDSLKNLAPGLDSNILKENPTDNIQLQNDRLFLYYLQNGKDMYTGKPLDIDQLSSYDIDHIIPQAFIKDDSIDNRVLTSSKDNRGKSDNVPSLEVVQKRKAFWQQLLDSKLISERKFNNLTKAERGGLDERDKVGFIRRQLVETRQITKHVAQILDASFNTEVNEKNQKIRTVKIITLKSNLVSNFRKEFELYKVREINDYHHAHDAYLNAVVAKAILKKYPKLEPEFVYGDYQKYDLKRYISRFKPSKEIEKATEKYFFYSNLLNFFKEEVHYADGIIVKRENIEYSKDTGEIAWNKEKDFATIKKVLSYPQVNIVKKTEIQTHGLDRGKPKGLFNSNPSPKPSEDSKENLVPIKQGLDPRKYGGYAGISNSYAVLVKAIVEKGAKKQQKTILEFQGISILDKINFENNKENYLLKKRYIEILSTITLPKYSLFEFPDGTRRRLASILSTNNKRGEIHKGNELVLPGKYTTLLYHAKNINKKLEPEHLEYVEKHRNDFAKLLECVLNFNDKYVGALKNGERIRQAFTDWETVDIEKLCFSFIGPENSKNAGLFELTSQGSASDFEFLGVKIPRYRDYAPSSLLKATLIHQSITGLYETRIDLSKLGED

SEQ ID NO: 762 - protein, 1377 aa, Streptococcus sanguinis
MKKPYSIGLDIGTNSVGWAVITDDYKVPSKKMKVLGNTDKHFIKKNLIGALLFDEGTTAEDRRLKRTSRRRYTRRKNRLRYLQEIFSEEISKLDSSFFHRLDDSFLVPEDKRGSKYPIFATLEEEKEYHKKFPTIYHLRKHLADSKEKTDLRLIYLALAHMIKYRGHFLYEESFDIKNNDIQKIFNEFISIYDNTFEGSSLSGQNAQVEAIFTDKISKSTKRERVLKLFSDEKSTGLFSEFLKLIVGNQADFKKHFDLEEKAPLQFSKDTYDEDLENLLGQIGDGFADLFLVAKKLYDAILLSGILTVTDPSTKAPLSASMIERYENHQEDLAALKQFIKNNLSEKYAEVFSDQSKDGYAGFIDGKTTQEAFYKYIKNLLSKLEGADYFLNKIEREDFLRKQRTFDNGSIPHQIHLQEMNAILRRQGEHYLFLKENREKIEKILAFRIPYYVGPLARGNRDFAWLTRNSDQAIRPWNFEEVVDKASSAEDFINKMTNYDLYLPEEKVLPKHSLLYETFAVYNELTKVKFIAEGLRDYQFLDSGQKKQIVNQLFKDKRKVTEKDIIHYLHNVDGYDGIELKGIEKQFNASLSTYHDLLKIIKDKEFMDNPKNGEILENIIHTLTIFEDREMIKQRLAQYDTLFDEKVIKALTRRHYTGWGKLSAKLINGIRDKQTGKTILEYLIDDGDCNRNFMQLINDDGLSFKEIIQKAQVVGKTDDVKQVVQEIPGSPAIKKGILQSIKIVDELVKVMGHNPESIVIEMARENQTTAKGKKNSQQRYKRIEDALKNLAPGLDSNILKENPTDNIQLQNDRLFLYYLQNGKDMYTGKAIDINQLSNYDIDHIIPQAFIKDDSLDNRVLTSSKDNRGKSDNVPSIEVVQKRKAFWQQLLDSKLISERKFNNLTKAKRGGLDERDKVGFIKRQLVETRQITKHVAQLLDTRFNTEVNEENQKIRTVKIITLKSNLVSNFRKEFGLYKVREINDYHHAHDAYLNAVVAKAILKKYPKLEPEFVYGDYQKYDLKRYILKSKASNTIDKATEKYFFYSNLLNFFKEKVRYADGTIKKRENIEYSNDTGEIAWNKEKDFATIKKVLSLPQVNIVKKTEEQTVGQNGGLFDNNIVSKKKVVDASKLIPIKSSLSPEKYGGYARPTIAYSVLVIADIEKGKGKAKKLKRIKEIVGITIQDKKKFESNPVTYLEECGYKNINSNLIIKLPKYSLFEFNDGQRRLLASSIELQKGNELILPYHLTALLYHAQRINKISEPIHKQYVEAHQNEFKELLTTIISLSKKYIQKPNVELLLQQAFDQADKDIYQLSESFISLLKLTSFGAPGAFKFLGVEISQSSVRYKPNSQFLDTTLIHQSITGLYETRIDLSKLGED

SEQ ID NO: 763 - protein, 1370 aa, Streptococcus sanguinis
MKKPYSIGLDIGTNSVGWAVVTDDYKVPAKKMRVFGDTDRSHIKKNLLGTLLFDDGNTAESRRLKRTARRRYTRRRNRILYLQEIFTESMNEIDESFFHRLDDSFLVPEDKRGSKYPIFATLQEEKEYHKQFPTIYHLRKQLADSKEKSDVRLIYLALAHMIKYRGHFLYEETFDIKNNDIQKIFNEFINIYDNTFEGSSLSGQNAQVEAIFTDKISKSAKRERVLKLFPDEKSTGLFSEFLKLIVGNQADFKKHFDLEEKAPLQFSKDTYDEELENLLGQIGDDFADLFLIAKKLYDAILLSGILTVTDPSTKAPLSASMIERYENHQKDLAALKQFIKNNLPEKYVEVFSDQSKDGYAGYIDGKTTQEAFYKYIKNLLSKFEGADYFLDKIEREDFLRKQRTFDNGSIPHQIHLQEMNAILRRQGEHYPFLKENREKIEKILTFRIPYYVGPLARDNRDFSWLTRNSDEPIRPWNFEEVVDKARSAEDFIHRMTNYDLYLPEEKVLPKHSLLYETFAVYNELTKVKFIAEGLRDYQFLDSGQKKQIVNQLFKEKRKVTEKDIIHYLHNVDGYDGIELKGIEKQFNANLSTYHDLLKITKDKEFMDDPKNEEILENIVHTLTIFEDREMIKQRLAQYDTLFDEKVIKALTRRHYTGWGKLSAKLINGIRDKQSGKTILDYLIDDDKINRNFMQLINDDGLSFKEIIQKAQVVGKTDDVKQVVQELPGSPAIKKGILQSIKIVDELVKVMGYALESIVIEMARENQTTARGKKNSQQRYKRIEDALKNLAPGLDSNILKENPTDNIQLKNDRLFLYYLQNGKDMYTGKPLDINQLSSYDIDHIIPQAFIKDDSIDNRVLTSSKDNRGKSDNVPSLEVVQKRKAFWQQLLDSKLISERKFNNLTKAERGGLDERDKVGFIRRQLVETQQITKNVAQILDARFNTEVKEKNQKIRTVKIITLKSNLVSNFRKEFGLYKVREINNYHHAHDAYLNAVVAKAILKKYPKLEPEFVYGDYQKYDLKKYISRFKPSKEIEKATEKYFFYSNLLNFFKEEVLYADGTIRKRENIEYSKDTGEIAWDKEKDFATIKKVLSYPQVNIVKKREVQTGGFSKESILPKGNSDKLIPRKTKDILWDTTKYGGFDSPVIAYSILLIADIEKGKAKKLKTVKTLVGITIMEKAAFEENPITFLENKGYHNVRKENILCLPKYSLFELENGRRRLLASAKELQKGNEIVLPVCLTTLLYHSKNLHKLDEPEHLEYIQKHRNEFKDLLNLVSEFSQKYILAEANLEKIKDLYADNEQADIEILANSFINLLTFTALGAPAAFKFFGKDVDRKRYTTVSEILNATLIHQSITGLYETRIDLSKLGEE

SEQ ID NO: 764 - protein, 1421 aa, Streptococcus sanguinis
MTKFNKNYSIGLDIGVSSVGYAVVTEDYRVPAFKFKVLGNTEKEKIKKNLIGSTTFVSAQPAKGTRVFRVNRRRIDRRNHRITYLRDIFQKEIEKVDKNFYRRLDESFRVLGDKSEDLQIKQPFFGDKELETAYHKKYPTIYHLRKHLADADKNSPVADIREVYMAISHILKYRGHFLTLDKINPNNINMQNSWIDFIESCQEVFDLEISDESKNIADIFKSSENRQEKVKKILPYFQQELLKKDKSIFKQLLQLLFGLKTKFKDCFELEEEPDLNFSKENYDENLENFLGSLEEDFSDVFAKLKVLRDTILLSGMLTYTGATHARFSATMVERYEEHRKDLQRFKFFIKQNLSEQDYLDIFGRKTQNGFDVDKETKGYVGYITNKMVLTNPQKQKTIQQNFYDYISGKITGIEGAEYFLNKISDGTFLRKLRTSDNGAIPNQIHAYELEKIIERQGKDYPFLLENKDKLLSILTFKIPYYVGPLAKGSNSRFAWIKRATSSDILDDNDEDTRNGKIRPWNYQKLINMDETRDAFITNLIGNDIILLNEKVLPKRSLIYEEVMLQNELTRVKYKDKYGKAHFFDSELRQNIINGLFKNNSKRVNAKSLIKYLSDNHKDLNAIEIVSGVEKGKSFNSTLKTYNDLKTIFSEELLDSEIYQKELEEIIKVITVFDDKKSIKNYLTKFFGHLEILDEEKINQLSKLRYSGWGRYSAKLLLDIRDEDTGFNLLQFLRNDEENRNLTKLISDNTLSFEPKIKDIQSKSTIEDDIFDEIKKLAGSPAIKRGILNSIKIVDELVQIIGYPPHNIVIEMARENMTTEEGQKKAKTRKTKLESALKNIENSLLENGKVPHSDEQLQSEKLYLYYLQNGKDMYTLDKTGSPAPLYLDQLDQYEVDHIIPYSFLPIDSIDNKVLTHRENNQQKLNNIPDKETVANMKPFWEKLYNAKLISQTKYQRLTTSERTPDGVLTESMKAGFIERQLVETRQIIKHVARILDNRFSDTKIITLKSQLITNFRNTFHIAKIRELNDYHHAHDAYLAVVVGQTLLKVYPKLAPELIYGHHAHFNRHEENKATLRKHLYSNIMRFFNNPDSKVSKDIWDCNRDLPIIKDVIYNSQINFVKRTMIKKGAFYNQNPVGKFNKQLAANNRYPLKTKALCLDTSIYGGYGPMNSALSIIIIAERFNEKKGKIETVKEFHDIFIIDYEKFNNNPFQFLNDTSENGFLKKNNINRVLGFYRIPKYSLMQKIDGTRMLFESKSNLHKATQFKLTKTQNELFFHMKRLLTKSNLMDLKSKSAIKESQNFILKHKEEFDNISNQLSAFSQKMLGNTTSLKNLIKGYNERKIKEIDIRDETIKYFYDNFIKMFSFVKSGAPKDINDFFDNKCTVARMRPKPDKKLLNATLIHQSITGLYETRIDLSKLGED

SEQ ID NO: 765 - protein, 317 aa, Unknown
  Streptococcus sp.
FEDSILFSYQVDSKFNRKISDATIYATRKAKLDKEKSEETYVLGKIKDIYSQAGYDAFIKIYNKDKSKFLMYHKDPQTFEKVIEEILRTYPSKELNDKNKEIPCNPFEKYRQENGPIRKYSKKSNGPEIKSLKYYDNKLGNHIDITPESSDNQVVLQSLKPWRTDVYFNHQTKKYELMGLKYSDLSFEKGSGKYSISNQKYNSIKRIEGIDEQSEFKFTLYKNDLILIKDSENNEQKLFRFNSRNDTAKHYIELKPYDKAKFDGEQELITILGNVAKGGRCLKGLNKSNISIFKVKTDVLGKKHIIKKEGDEPKLKF

SEQ ID NO: 766 - protein, 1420 aa, Unknown
  Streptococcus sp.
MAKFNKNYSIGLDIGVSSVGYAVVTEDYRVPAFKFKVLGNTEKEKIKKNLIGSTTFVPAQSAQGTRVFRVNRRRIDRRNHRIAYLRDIFQKEIEKIDKNFYRRLDESFRVLGDKSEDIQIKQPFFGNKELETAYHKKYPTIYHLRKHLADADKNSPVADIREVYMVLSHILKYRGHFLTLGKIDPNNINMQNSWIDFIESCQDAFDLEISDESKTIAAIFKSSENRQEKVKQILSYFQQELLKKDKSIFKQLLQLLFGLKTKFKDCFELEEEPDLNFSKENYDENLENLLGALEEDFSDVFAKLKILRDTILLSSMLTYTGATHARFSATMVERYEEHRKDLQRFKSFVKQNLSEQDYLDIFGRKTPTGFDVDKETKGYVGYISNKMVLTNPQKQKTIQQNFYDYISGKITGIEGAECFLNKISDGTFLRKLRTTDNGAIPNQIHAYELEKIIERQGRDYPFLLENKDKLLSILTFKIPYYVGPLAKGNNSRFAWIKRTTSQDVLDDNDEDTRNGKIRPWNYHKLINMDETRDAFIINLIGNDIILLNEKVLPKRSLIYEEVMLQNELTRVKYKDKYGKIHFFNSELRQEIINNLFKTNSKRVSSAMLLSYLENFTNLQAVEIVSGIEKGKSLNSTLKTYNDLKTIFSEELLDSEIYQKELEEIIKVITVFDDKKSIKNYLTKYFGHLEFLNEEKINQLSKLRYTGWGRYSGKLLLGIRDEDTGFNLMQFLRNDDENRNLTQLISDTTLSFDSAIKAIQSKSTVEDDVFEEIKNLAGSPAIKRGILNSIKIVDELVQIIGYPPQNIIIEMARENMTTEEGQKKAKTRKSKLESALKNIEDSVLESGKVPHSDEQLQSEKLYLYYLQNGKDMYSLDKTGSPTPLYRDQLDQYEVDHIIPYSFLPIDSIDNKVLTHRENNQRKLNNIPDKETVANMKPFWEKLYNAKLISQTKYQRLTTSERTPDGVLTESMKAGFIERQLVETRQIIKHVARILDNRFSDTKIITLKSQLVTNFRNTFHIAKIRELNDYHHAHDAYLAVVVGQTLLKAYPKLAPELIYGHHAHFNRHEENKATLRKHLYSNIMRFFNNPDSKVSKDIWDCNRDLPIVKDVIYNSQINFVKRTMIKKGAFYNQNPVGKLNKQIAANNRYPLKTKVSSLDTSIYGGYGPMNSALSIIIIAERFNEKKGKIETVKEFHDIFIIDYEKFNNNPFQFLNNVSEEGFLKKNDLNRVLAFYRISKYSLMQKIDGTRMLFESKSNLHKVTQFKLTKTQNELFFHMKRLLTKSNLMDLKSESAIKESQNFIQTHQNEFDNIADRLSNYSQKMLGETKSLQTLINGYNERPIKQIDNNEETIRYYYDNFIKMFSFVKSGAPKDIINFFNDKYTVPRMRPKPDRKMLDATLIHQSITGLYETRIDLSKLGED

SEQ ID NO: 767 - protein, 1371 aa, Unknown
  Streptococcus sp.
MENKNYSIGLDIGTNSVGWSVITDDYKVPSKKMKVLGNTDKHFIKKNLIGALLFDEGTTAEARRLKRTARRRYTRRKNRLRYLQEIFSEEIGKVDSSFFHRLDDSFLIPEDKRGSKYPIFATLAEEKKYHKQFPTIYHLRKQLADSKEKTDLRLIYLALAHMIKYRGHFLYEEAFDIKNNDIQKIFNEFISIYNNTFEGNSLSGQNVQVEAIFTDKISKSAKRERVLKLFPDEKSTGLFSEFLKLIVGNQADFKKHFDLEEKAPLQFSRDTYDEDLENLLGQIGDDFADLFLVAKKLYDAILLSGILTVTNPSTKAPLSASMIERYENHQKDLASLKQFIKNNLPEKYDEVFSDQSEDGYAGYIDGKTTQETFYKYIKNLLSKFEGADYFLDKIEREDFLRKQRTFDNGSIPHQIHLQEMNAILRRQGEHYPFLKENKEKIEKILTFRIPYYVGPLARGNRDFAWLTRNSDQAIRPWNFEEIVDKASSAEDFINKMTNYDLYLPEEKVLPKHSLLYETFAVYNELTKVKFIAEGLRDYQFLDSGQKKQIVTQLFKEKRKVTEKDIIQFLHNVDGYDGIELKGIEKQFNASLSTYHDLLKIIKDKAFMDDAKNEAILENIVHTLTIFEDREMIKQRLAQYDSLFDEKVIKALTRRHYTGWGKLSAKLINGISDKQTGNTILDYLIDDGEINRNFMQLINDDGLSFKEIIQKAQVVGKTNDVKQVVQELPGSPAIKKGILQSIKIVDELVKVMGHAPESIVIEMARENQTTARGKKNSQQRYKRIEDSLKILASGLNSKILKEHPTDNIQLQNDRLFLYYLQNGKDMYTGEALDINQLSSCDIDHIIPQAFIKDDSLDNRVLTSSKDNRGKSDNVPSLEVVDKMKVFWQQLLDSKLISYRKFNNLTKAERGGLNELDKVGFIKRQLVETRQITKHVAQILDARFNKEVTEKDKKNRTVKIITLKSNLVSNFRKEFELYKVREINDYHHAHDAYLNAVVAKAILKKYPKLEPEFVYGDYQKYDLKRYISRSKDPKEIEKATEKYFFYSNLLNFFKEEVHYADGTIVKRENIEYSKDTGEIAWNKEKDFATIKKVLSLPQVNIVKKREVQTGGFSKESILPKGNSDKLIPRKTKDILWDTTKYGGFDSPVIAYSILLIADIEKGKAKKLKTVKTLVGITIMEKDAFEKNPIAFLENKGYHNVCKENILCLPKYSLFELENGRRRLLASAKELQKCNEIVLPVYLTTLLYHSKNVHKLDEPGHLEYIQKHRNEFKDLLNLVSEFSQKYVLADANLEKIKNLYADNEQADIEILANSFINLLTFTALGAPAAFKFFGKDVDRKRYTTVSEILNATLIHQSITGLYETRIDLSKLGED

SEQ ID NO: 768 - protein, 93 aa, Unknown
  Streptococcus sp.
MILIKDSENNEQKLFRFNSRNDTAKHYVELKPYDKARFDGQQELITILGNVAKGGQCLKGLNKSNISIFKVKTDVLGKKHIIKKEGDEPKLKF

SEQ ID NO: 769 - protein, 1121 aa, Unknown
  Streptococcus sp.
MNGLVLGLDIGIASVGVGILEKNSGKIIHANSRLFPAATADNNVERRKNRQARRLHRRKKHRGVRFQDLFEDYGLLTDFSKVSINLNPYRLRVDGLNQQLTNEELFIALKNIVKRRGISYLDDASEDGGTVSSDYGKAVEENRKLLAEQTPGQIQLERFEKYGQVRGDFTVVENGEKRRLINVFSTSAYRKEAERILRKQQEFNSKITDEFIEDCLKILTGKRKYYHGPGNEKSRTDYGRFRTDGTTLDNIFGILIGKCTFYPDEYRASKASYTAQEFNLLNDLNNLTVPTETKKLSEEQKKVIVEYAKEAKTLGASTLLKYIAKMIDASVDQIRGYRVDVNNKPEIHTFEAYRKMQSLETISVGELSRNVLDELAHILTLNTEREGIEEAINTKLKDSFSQDQVLELVQFRKNNSSLFSKGWHNFSLKLMMELIPELYETSEEQMTILTRLGKQKSKEISKRTKYIDEKELTEEIYNPVVAKSVRQAIKIINEATKKHGIFDNIVIEMARENNEEDAKKDYIKRQKANQDEKNAAMEKAAFQYNGKKELPDSIFHGQKELATKIRLWHQQGEKCLYTGKNIPISDLIHNQYKYEIDHILPLSLSFDDSLSNKVLVLATANQEKGQRTPFQALDSMDDAWSYREFKSYVKESKLLGNKKKEYLLTEEDISKIEVKQKFIERNLIDTRYSSRVVLNALQDFYKAHKFDTTISVVRGQFTSQLRRKWGLEKSRETYHHHAVDALIIAASSQLRLWKKQNNPLIAYKEGQFVDSETGEIISLSDDEYKELVFKAPYDHFVDTLSSKTFEDSILFSYQVDSKFNRKISDATIYATRKAKLDKEKSEETYVLGKIKDIYSQAGYDAFIKIYNKDKSKFLMYHKDPQTFEKVIEEILRTYPSKELNDKNKEIPCNPFEKYRQENGPIRKYSKKSNGPEIKSLKYYDNKLGNHIDITPESSDNQVVLQSLKPWRTDVYFNHQTKKYELMGLKYSDLSFEKGSGKYSISNQKYNSIKRIEGIDEQSEFKFTLYKNDLILIKDSENNEQKLFRFNSRNDTAKHYIELKPYDKAKFDGEQELITILGNVAKGGRCLKGLNKSNISIFKVKTDVLGKKHIIKKEGDEPKLKF

SEQ ID NO: 770 - protein, 1026 aa, Unknown
  Streptococcus sp.
MNGLVLGLDIGIASVGVGILEKNSGKIIHANSRLFPAATADNNVERRKNRQARRLNRRKKHRGVRFQDLFEDYGLLTDFSKVSINLNPYRLRVDGLNQQLTNEELFIALKNIVKRRGISYLDDASEDGGAVSSDYGKAVEENRKLLAEQTPGQIQLERFEKYGQVRGDFTVVENGEKRRLINVFSTSAYRKEAEKILRKQQEFNNQITDEFIEDYLKILTGKRKYYHGPGNEKSRTDYGRFRTDGTTLDNIFGVLIGKCTFYPNEYRASKSSYTAQEFNLLNDLNNLTVPTETKKLSEEQKKVIVEYAKEAKTLGASTLLKYIVKMIDASVDQISGYRVDVNNKPEMHTFEVYRKMQSLETISVGELSRNVLDELAHILTLNTEREGIEEAINSKLMGVFSQDQVLELVQFRKNNSSLFSKGWHNFSLKLMMELIPELYETSEEQMTILTRLGKQKSKETSKRTKYIDEKELTEEIYNPVVAKSVRQAIKIINEATKKHGIFDNIVIEMARENNEEDAKKDYIKRQKANQDEKNAAMEKAAFQYNGKKELPGNIFNGHKELATKIRLWHQQGEKCLYTGKTIPISDLIHNQYKYEIDHILPLSLSFDDSLSNKVLVHATANQEKGQRTPFQALDSMDDAWSYREFKSYVKDLKSLSNKKKDYLLTEEDISKIEVKQKFIERNLVDTRYSSRVVLNALQDFYKSHQFDTTISVVRGQFTSQLRRKWGLEKSRETYHHHAVDALIIAASSQLRLWKKQNNPLITYKEGQFIDSQTGEIISLTDDEYKELVFKAPYDHFVDTLHSKTFEDGILFSYQVDSKYNRKISDATIYATRKAKLDKDKSEETYVLGKIKDIYSQAGYDAFIKIYNKDKRKFLMYHKDPQTFEKVIEEILRTYPSKERNDKNKEVPCNPFEKYRQENGPIRKYSKKGNGPEIKCLKYYDNKLGNYIDISPDGSDNQVVLQSLKPWRTDVYFNHQTKKYELMGLKYSDLSFEKGSGKYSISNEKYNSIKRIEGVNEQSEFKFTLYK

SEQ ID NO: 771 - protein, 1377 aa, Unknown
  Streptococcus sp.
MNNKPYSIGLDIGTNSVGWSVITDDYKVPSKKMKVLGNTDKRFIKKNLIGALLFDEGTTAEARRLKRTARRRYTRRKNRLRYLQEIFAEEMSKVDSSFFHRLDDSFLIPEDKRGSKYPIFATLVEEKEYHKQFPTIYHLRKQLADSKEKADLRLIYLVLAHMIKYRGHFLYEEAFDIKNNDIQKIFNEFISIYDNTFEGSSLSGQNAQVETIFTDKISKSAKRERVLKLFPDEKSTGLFSEFLKLIVGNQADFKKHFDLEEKAPLQFSKDTYDEDLENLLEQIGDDFADLFVAAKKLYDAILLSGILTVTDPSTKAPLSASMIERYENHQKDLAVLKQFIKTNLPEKYVEVFSDQSKDGYAGYIDGKTTQEAFYKYIKNLLSKFDGADYFLDKIEREVFLRKQRTFDNGSIPHQIHLQEMNTILRRQGEHYPFLKENKEKIEKILTFRIPYHVGPLARGNRDFAWLTRNSDQAIRPWNFEEIVDKASSAEDFINKMTNYDLYLPEEKVLPKHSLLYETFAVYNELTKVKFIAEGMRDYQFLDSGQKKKIINQLFKKKRKVTEDDIIDCLQKIDNYDGIELKGIEKQFNASLSTYHDILKIIRDKEFMDDPKNGDILENVIHTLTIFEDREMIKQRLAQYNSIFDEKVIKALSRKHYTGWGKLSAKLIDGIRDKQTGKTILDYLMDDGKSNRNFMQLIKDDELSFTEIIQKAQVVGDTDNLRQVVQNLPGSPAIKKGILQSIKIVDELVKVMGHAPESIVIEMARENQTTARGKKNSQQRYKRIEDSLKNLASGLDSNILKENPTDNIQLQNDRLFLYYLQNGKDMYTGEALNINQLSSYDIDHIIPQAFIKDDSLDNRVLTSSKDNRGKSDNVPSLEVVEKMKAFWQQLLDSKLISERKYNNLTKAERERGGLNELDKVGFIKRQLVETRQITKHVAQILDARFNKEVTEKNKKNRNVKIITLKSNMVSNFRKEFGLYKVREINDYHHAHDAYLNAVVAKAILKKYPKLEPEFVYGDYQKYDLKRYISRSKDPKEVEKATEKYFFYSNLLNFFKEEVHYADGTIVKRENIEYSKDTGEIAWNKEKDFATIKKVLSLPQVNIVKKTEEQTVGQNGGLFDNNIVSKKKVVDASKLIPIKSGLSPEKYGGYARPTIAYSVLVTYKQNNKIKNTMVGIPVLTKLEFERDPNLYLRNLGINNVSHVIKLVKYTVLEFKHKYGTYRRFIVSNQELKRANQIFVTTKQMKLISQYTTLDKNEHDSLLKNNQQLIQSIWNQFLEFMLATDLVNKKQYDELILTNNQTIEECRNIMNRVITTLSFTNINAGQKKIIFDDTLSLPIKRWQFTDSDKMVKKIIESTLIHQSITGLYETRIDLSKLGED

SEQ ID NO: 772 - protein, 1371 aa, Unknown
  Streptococcus sp.
MNNNNYSIGLDIGTNSVGWAVITDDYKVPSKKMRVLGNTDKRFIKKNLIGALLFDEGTTAEDRRLKRTARRRYTRRKNRLRYLQEIFAEEMSKVDSSFFHRLDDSFLVPEDKSGSKYPIFATLAEEKEYHKKFPTIYHLRKHLADSKEKADLRLIYLALAHITKYRGHFLYEEAFDIKNNDIQKIFNEFINIYDNTFEGSSLSGQNAQVEAIFTGKISKSVKREHVLKLFPDEKSTGLFSEFLKLIVGNQADFKKHFDLEEKASLQFSKDTYDEDLENLLGQIGDDFADLFLVAKKLYDAILLSGILTVTDPSTKAPLSASMIERYENHQEDLAALKQFIKNNLPEKYAEVFSDQSKDGYAGYIDGKTTQEAFYKYIKNLLSKFEGADYFLDKIEREDFLRKQRTFDNGSIPHQIHLQEMNAILRRQGEHYPLLKENKEKIEKILTFRIPYYVGPLARGNRDFAWLTRNSDQAIRPWNFEEIVDKASSAESFINKMTNYDLYLPEEKVLPKHSLLYETFAVYNELTKVKFIAEGLRDYQFFDSGQKKQIVNQLFKEKRKVTEKDIIHYLHNVDGYDGIELKGIEKQFNASLSTYHDLLKIIKDKEFMDNHKNQEILENIVHTLTIFEDREMIKQRLAQYDSIFDEKVIKALTRRHYTGWGKLSAKLINGICDKKTGKTILDYLIDDGYNNRNFMQLINDDGLSFKEIIQKAQVVGKTDDLTQVVRELSGSPAIKKGILQSIKIVDELVKIMGYAPESIVIEMARENQTTAKGKKNSQQRYKRIEDALKNLAPGLDSTISKENPTDNIQLQNDRLFLYYLQNGKDMYTGEALDINQLSSYDIDHIIPQAFIKDDSLDNRVLTSSKDNRGKSDNVPSLEVVKKRKAFWQQLLDSKLISERKFNNLTKAERGGLDERDKVGFIKRQLVETRQITKHVARILDARFNTEVSEKNQKIRSVKIITLKSNLVSNFRKEFKLYKVREINDYHHAHDAYLNAVVAKAILKKYPKLEPEFVYGDYQKYDLKRYISKSKDPKEVEKATEKYFFYSNLLNFFKEEVHYADGTIVKRENIEYSKDTGEIAWNKEKDFVTIKKVLSYPQVNIVKKREVQTGGFSKESILPKGNSDKLIPRKTKDILWDTTKYGGFDSPVIAYSILLIADIEKGKAKKLKTVKTLVGITIMEKAAFEKNPITFLENKGYHNVRKENILCLPKYSLFELENGRRRLLASAKELQKGNEIVLPVYLTTLLYHSKNVHKLDEPEHLEYIQKHRYEFKDLLNLVSEFSQKYVLAEANLEKIKSLYVDNEQADIEILANSFINLLTFTALGAPAAFKFFGKDVDRKRYTTVSEILNATLIHQSITGLYETRIDLSKLGED

SEQ ID NO: 773 - protein, 1139 aa, Unknown
  Streptococcus sp.
MSDLVLGLDIGIGSVGVGILNKVTGEIIHKNSRIFPAAQAENNLERRTNRQGRRLTRRKKHRRVRLNHLFEESGLITDFTKVSINLNPYQLRVKGLTAELSNEELFIALKNMVKHRGISYLDDASDDGNSSVGDYAQIVKENSKQLETKTPGQIQLERYQKYGQLRGDFTVEEDGRKHRLINVFPTSAYHAEALRILQTQQEFNPQITDEFINSYLEILTGKRKYYHGPGNEKSRTDYGKYTTKKDAQGQYITLNNIFGILIGKCTFYPEEYRAAKASYTAQEFNLLNDLNNLTVPTETKKLSEEQKYQIITYVKNEKAMGPAKLFKYIAKLLSCDVADIKGYRIDKSDKAEIHTFEAYRKMKTLETLDVKKMAREELDKLAYVLTLNTEREGIQEALDHEFADGTFSQEQVDELVQFRKANSSIFGKGWHSFSVKLMMELIPELYATSEEQMTILTRLGKQKTTSSSNKTKYIDEKQLTEEIYNPVVAKSVRQAIKIVNAAIKKYGDFDNIVIEMARETNEDDEKKAIQKIQKANKAEKDAAMRKAANQYNGKAELPHSVFHGHKQLATKIRLWHQQGERCLYTGKTISIHDLINNPNQFEIDHILPLSITFDDSLANKVLVYATANQEKGQRTPYQALDSMDDAWSFRELKAFVRESKALSNKKKEYLLTEEDISKFDVRKKFIERNLVDTRYASRVVLNALQEHFRTHKIDTKVSVVRGQFTSQLRRHWGIEKTRDTYHHHAVDALIIAASSQLNLWKKQKNTLVSYSEDQLLDIETGELISDDEYKESVFKAPYQHFVDTLKSKEFEDSILFSYQVDSKFNRKISDATIYATRKAKLDKEKKEYTYTLGKIKDIYALGTKTPSKTGFYKFLDLYKKDKSQFLMYQKDRRTWDEVIEKILEQYRPFKEKDKNGKEVDFNPFEKYRIENGPIRKYSRKGNGPEIKSLKYYDNLLGRFVDITPSESKNPVALLSLNPWRTDVYYNTETRKYEFLGLKYADLCFEKGGSYGISKVKYNKIREKEGIGKNSEFKFTLYKNDLILIKDTETNRQQIFRFWSRTGKDNPKSFEKHKLELKPYEKTRFEKGEELKVLGKVPPSSNRLQKNMQIENLSIYKVRTDVLGNQHIIKNEGDKPKLDF

SEQ ID NO: 774 - protein, 1375 aa, Unknown
  Streptococcus sp.
MSNKSYSIGLDIGTNSVGWAVITDDYKVPSKKMKVLGNTDKHFIKKNLIGALLFDEGTTAEDRRLKRTARRRYTRRKNRLRYLQEIFSQEISKVDSSFFHRLDDFFLVPEDKRGSKYPIFATLVEEKEYHKKFPTIYHLRKHLADSKEKTDLRLIYLALAHMIKYRGHFLYEESFDIKNNDIQKIFSEFISIYDNTFEGKSLSGQNAQVEAIFTDKISKSTKRERVLKLFPDEKSTGLFSEFLKLIVGNQADFKKHFDLEEKAPLQFSKDTYDEDLENLLGQIGDDFADLFLVAKKLYDAILLSGILTVKDLSTKAPLSASMIERYENHQKDLAALKQFIQNNLQEKYDEVFSDQSKDGYAGYIDGKTTQEAFYKYIKNLLSKFEGADYFLDKIEREDFLKKQRTFDNGSIPHQIHLQEMNAIIRRQGEHYPFLQENKEKIEKILTFRIPYYVGPLARGNGDFAWLTRNSDQAIRPWNFEEIVDQASSAEDFINKMTNYDLYLPEEKVLPKHSLLYETFAVYNELTKVKFIAEGLTRYQFLDKKQKKDIFDTFFKAENKRKVTEKDIIHYLHNVDGYDGIELKGIEKQFNASLSTYHDLLKIIKDKAFMDDSKNEEILENIIHTLTIFEDREMIKQRLAQYDSLFDEKVIKALTRRHYTGWGKLSAKLINGIRDKKSGKTILDYLIDDGEINRNFMQLIHDDGLSFKEIIQKAQVFGKTNDVKQVVQELPGSPAIKKGILQSIKIVDELVKVMGHAPESIVIEMARENQTTARGKKNSQQRYKRIEDSLKNLASGLDSNILKENPTDNIQLQNDRLFLYYLQNGRDMYTGKPLEINQLSNYDIDHIIPQAFIKDDSLDNRVLTSSKDNRGKSDNVPSLEVVEKMKAFWQQLLDSKLISERKFNNLTKAERERGGLNELDKVGFIKRQLVETRQITKHVAQFLDARFNKEVTEKDKKNRNVKIITLKSNLVSNFRKEFGLYKVREINDYHHAHDAYLNAVLAKAILKKYPKLEPEFVYGDYQKYDLQRYISKSREPKEVEKATQKYFFYSNLLNFFKEEVHYADGTIVKRENIEYSKDTGEIAWNKEKDFATVKKVLSLPQVNIVKKTEVQTGGFSKESILPKGNSDKLIPRKTKEILWDTTKYGGFDSPVIAYSILLIADIEKGKAKKLKTVKTLVGITIMEKATFEKNPITFLENKGYHNVRKENILCLPKYSLFELESGRRRMLASAKELQKGNEIVLPVYLTTLLYHSKNVHKLDEPEHLEYIQKHRYEFKDLLNLVSEFSQKYVLADANLEKIKNLYADNEQADIEILANSFINLLTFTALGAPAAFKFLGKDVDRKRYTTVSEILNATLIHQSITGLYETRIDLSKLGED

SEQ ID NO: 775 - protein, 206 aa, Unknown
  Streptococcus sp.
RTPFQALDSMDDAWSYREFKSYVKESKLLGNKKKEYLLTEEDISKIEVKQKFIERNLIDTRYSSRVVLNALQDFYKAHKFDTTISVVRGQFTSQLRRKWGLEKSRETYHHHAVDALIIAASSQLRLWKKQNNPLIAYKEGQFVDSETGEIISLSDDEYKELVFKAPYDHFVDTLSSKTFEDSILFSYQVDSKFNRKISDATIYATR

SEQ ID NO: 776 - protein, 1122 aa, Streptococcus suis
MSNGKILGLDIGIASVGVGVIDAQTGEIIHASSRIFPSANAANNAERRTFRGSRRLIRRKKHRIKRLDDLFNDFHINLDGEMSTDNPYVLRVKGLSQKLTVEELYISIKNIMKRRGISYLDDAESDNEAGRSDYAKAIERNRQLLTSKTPGEIQLERLEKYGQLRGNFTIIDEEGQSQQIINVFSTSDYVKEVEKILDCQKMYHKFISDEFCDKLIELLREKRKYYVGPGNEKSRTDYGIYRTDGTTLENLFGILIGKCTFYPDQYRSSRASYTAQEFNFLNDLNNLTVPTETKKLSQEQKEFLVNYAKETSVLGAGKILQQIAKLADCKVEDIRGYRLDNKDKPELHTFETYRAMKGLVPLVDIGVLSREQLDILADILTLNTDFEGIREALKKQLPNVFDEKQVKGLASFRKSKSQLFAKGWHNLSQKIMLEVIPELYATSDEQMTILTRLGKFEKSSVAEYPSSINVDEITDEIYNPVVAKSIRQTIKIINASIKKWDEFDQIVIEMPRDRNEDEEKKRIADGQKANAKEKADSILRAAELYCAGKVLPDYVYNGHNQLATKIRLWYQQGERCIYTGQPISIHDLIHNQNQYEIDHILPLSLTFDDSLSNKVLVLATANQEKAQRTPYNYLKSATSAWSYREFKDYVTKRKGIGKKKCEYLTFEEDINGFEVRSKFIQRNLVDTRYASKVILNALQDYFKISGIQTKVSVVRGQFTSQLRHKWGIEKTRETYHHHAVDALIIAASSQLRLWKKQESPLVVDYQEGRQVDLETGEILELTDEQYKELVYQPPYQGFVNTISSSAFDNEILFSYQVDSKVNRKISDATIYATRNAQLGKDKTEGIYVLGKIKDIYTQAGYEAFLKRYTKDKTSFLMYHKDLDTWEKVIEIILRDYREYDEKGKEIGNPFERYRRENGYVKKYSRKGNGTAIKSLKYYDNKLGNHIDITPENSRNAVVLQSLKPWRTDVYFNKETGKYEFLGIKYSDLSFEKGTGEYGISQEKYDSIKIAEGVAKKSIFKFTLYKQDLLFIKDIENNFGKLLRFTSKNDTSKHYVELKPYDKNKFGTEEPLLPVLGNVAKSGQCIKGLNKSNISIYKVRTDILGYRHFIKQEGEHPQLKFKK

SEQ ID NO: 777 - protein, 1381 aa, Streptococcus suis
MVKKKYAIGIDIGTNSVGWSIVTDDYKVPSKKMKVFGNTEKRYIKKNLLGTLLFDEGNTAENRRLKRTARRRYTRRRNRILYLQEIFAEEINKIDDSFFQRLDDSFLIVEDKQGSKHPIFGTLQEEKEYHKQFPTIYHLRKQLADSSQKADIRLIYLALAHIIKYRGHFLFEGDLKSENKDVQHLFNDFVEMFDKTVEGSYLSENLPNVADVLVEKVSKSRRLENILHYFPNEKKNGLFGNFLALALGLQPNFKTNFELAEDAKIQFSKETYEEDLEELLGKIGDDYADLFIATKSLYDGILLAGILSTTDSTTKAPLSSSMVNRYEEHQKDLALLKNFIHQNLSDSYKEVFNDKLKDGYAGYIEGKTTQENFYRFIKKAIEKIEGSNYFIDKIDREDFLRKQRTFDNGSIPHQIHLQEMHAIIRRQAEFYPFLVENQDKIEKILTFRIPYYVGPLARGKSEFAWLNRKSDEKIRPWNFDEMVDKETSAENFITRMTNYDRYLPDQKVLPKHSLLYEKFAVYNELTKVKFIAEGMRDYQFLDSGQKKDIVKTLFKTKRKVTAKDIKAYLENSNGYAGVELKGLEEQFNASLPTYHDLLKILRDKAFIDAEENQEILEDIVLTLTLFEDREMIRKRLEKYKDILTEEQRKKLERRHYTGWGRLSAKLINGILDKVTRKTILGYLIDDGTSNRNFMQLINDDTLSFVDEIRLAQGSGEAEDYRAEVQNLAGSPAIKKGILQSLKIVDELIEVMGYEPEHIVVEMARENQFTNQGRRNSQQRINRLENALKDFGSKILEEQKPYGVSKVNNIHLQSDRLFLYYLQNGKDMYTDEELDIDHLSEYDIDHIIPQAFIKDDSLDNKVLTKSAKNRGKSDDVPSMEIVHNRKNFWRQLLKSKLISQRKFDNLTKAERGGLTNEDKARFIQRQLVETRQITKHVARMLDTRFNTKLDEAGNRIRDPKVNIITLKSNLVSQFRKDYQLYKIREINNYHHAHDAYINAVVATALLKKYPQLAPEFVYGEYPTYNSYNSRKSATEKVLFYSNIMNFFKRIVVHSKTGEVRIRPVIEVNKETGEIVWDKKSDFRTVRKVLSYPQVNVVKKTEVQNHGLDRGKPKGFYNANLSPRPKEGSVENLVPAKQSFDTKRYGGYAGISNSYAVLVNGIIEKGKKKSKAEVTEFQGISILARKDFDKNPKQYLLNLGYKDIKSIIKLPKYSLFELENGSRRMLASILSTNNKRGEIHKGNEMYLPDKFVTLLYHAMRVNRTLEPGHKKYVETHRHVFDELLIYILEYNEKIVGAKANGKRIVEAYSARKDTDNLEELCNSFINLLNLTALGSAVDFEFLGTKIPRYRDYTPSSLLKATLIHQSVTGLYETRIDLSKLGGD

SEQ ID NO: 778 - protein, 39 aa, Streptococcus thermophilus
GRCIKGLGKSNISIYKVRTDVLGNQHIIKNEGDKPKLDF

SEQ ID NO: 779 - protein, 302 aa, Streptococcus thermophilus
MIRRKKHRIVRLNRLFEESGLITDFTKISINLNPYQLRVKGLTDELSNEELFIALKNMVKHRGISYLDDASDDGNSSVGDYAQIVKENSKQLETKTPGQIQLERYQTYGQLRGDFTVEKDGKKHRLINVFPTSAYRSEALRILQTQQEFNPQITDEFINRYLEILTGKRKYYHGPGNEKSRTDYGRYRTSGETLDNIFGILIGKCTFYPDEFRAAKASYTAQEFNLLNDLNNLTVPTETKKLSKEQKNQIINYVKNEKAMGPAKLFKYIAKLLSCDVADIKGYRIDKSGKAERFILSKPIEK

SEQ ID NO: 780 - protein, 1121 aa, Streptococcus thermophilus
MSDLVLGLDIGIGSVGVGILNKVTGEIIHKNSRIFPAAQAENNLVRRTNRQGRRLTRRKKHRIVRLNRLFEESGLITDFTKISINLNPYQLRVKGLTDELSNEELFIALKNMVKHRGISYLDDASDDGNSSVGDYAQIVKENSKQLETKTPGQIQLERYQTYGQLRGDFTVEKDGKKHRLINVFPTSAYRSEALRILQTQQEFNPQITDEFINRYLEILTGKRKYYHGPGNEKSRTDYGRYRTSGETLDNIFGILIGKCTFYPDEFRAAKASYTAQEFNLLNDLNNLTVPTETKKLSKEQKNQIINYVKNEKAMGPAKLFKYIAKLLSCDVADIKGYRIDKSGKAEIHTFEAYRKMKTLETLDIEQMDRETLDKLAYVLTLNTEREGIQEALEHEFADGSFSQKQVDELVQFRKANSSIFGKGWHNFSVKLMMELIPELYETSEEQMTILTRLGKQKTTSSSNKTKYIDEKLLTEEIYNPVVAKSVRQAIKIVNAAIKEYGDFDNIVIEMARETNEDDEKKAIQKIQKANKDEKDAAMLKAANQYNGKAELPHSVFHGHKQLATKIRLWHQQGERCLYTGKTISIHDLINNSNQFEVDHILPLSITFDDSLANKVLVYATANQEKGQRTPYQALDSMDDAWSFRELKAFVRESKTLSNKKKEYLLTEEDISKFDVRKKFIERNLVDTRYASRVVLNALQEHFRAHKIDTKVSVVRGQFTSQLRRHWGIEKTRDTYHHHAVDALIIAASSQLNLWKKQKNTLVSYSEDQLLDIETGELISDDEYKESVFKAPYQHFVDTLKSKEFEDSILFSYQVDSKFNRKISDATIYATRQAKVGKDKADETYVLGKIKDIYTQDGYDAFMKIYKKDKSKFLMYRHDPQTFEKVIEPILENYPNKQMNEKGKEVPCNPFLKYKEEHGYIRKYSKKGNGPEIKSLKYYDSKLGNHIDITPKDSNNKVVLQSVSPWRADIYFNNTTGKYEILGLKYADLQFEKGTGTYKISQEKYNDIKKKEGVDSDSEFKFTLYKNDLLLVKETETKEQQLFRFLSRTMPKQKHYVELKPYDKQKFEGGEALIKVLGNVANGGQCIKGLGKSNISIYKVRTDVLGNQHIIKNEGDKPKLDF

SEQ ID NO: 781 - protein, 1121 aa, Streptococcus thermophilus
MSDLVLGLDIGIGSVGVGILNKVTGEIIHKNSRIFPAAQAENNLVRRTNRQGRRLTRRKKHRIVRLNRLFEESGLITDFTKISINLNPYQLRVKGLTDELSNEELFIALKNMVKHRGISYLDDASDDGNSSVGDYAQIVKENSKQLETKTPGQIQLERYQTYGQLRGDFTVEKDGKKHRLINVFPTSAYRSEALRILQTQQEFNPQITDEFINRYLEILTGKRKYYHGPGNEKSRTDYGRYRTSGETLDNIFGILIGKCTFYPDEFRAAKASYTAQEFNLLNDLNNLTVPTETKKLSKEQKNQIINYVKNEKAMGPAKLFKYIAKLLSCDVADIKEYRIDKSGKAEIHTFEAYRKMKTLETLDIEQMDRETLDKLAYVLTLNTEREGIQEALEHEFADGSFSQKQVDELVQFRKANSSIFGKGWHNFSVKLMMELIPELYETSEEQMTILTRLGKQKTTSSSNKTKYIDEKLLTEEIYNPVVAKSVRQAIKIVNAAIKEYGDFDNIVIEMARETNEDDEKKAIQKIQKANKDEKDAAMLKAANQYNGKAELPHSVFHGHKQLATKIRLWHQQGERCLYTGKTISIHDLINNSNQFEVDHILPLSITFDDSLANKVLVYATANQEKGQRTPYQALDSMDDAWSFRELKAFVRESKTLSNKKKEYLLTEEDISKFDVRKKFIERNLVDTRYASRVVLNALQEHFRAHKIDTKVSVVRGQFTSQLRRHWGIEKTRDTYHHHAVDALIIAASIQLNLWKKQKNTLVSYSEDQLLDIETGELISDDEYKESVFKAPYQHFVDTLKSKEFEDSILFSYQVDSKFNRKISDATIYATRQAKVGKDKADETYVLGKIKDIYTQDGYDAFMKIYKKDKSKFLMYRHDPQTFEKVIEPILENYPNKQINEKGKEVPVNPFLKYKEEHGYIRKYSKKGNGPEIKSLKYYDSKLGNHIDITPKDSNNKVVLQSVSPWRADVYFNKTTGKYEILGLKYADLQFEKGTGTYKISQEKYNDIKKKEGVDSDSEFKFTLYKNDLLLVKDTETKEQQLFRFLSRTMPKQKHYVELKPYDKQKFEGGEALIKVLGNVANSGQCKKGLGKSNISIYKVRTDVLGNQHIIKNEGDKPKLDF

SEQ ID NO: 782 - protein, 1121 aa, Streptococcus thermophilus
MSDLVLGLDIGIGSVGVGILNKVTGEIIHKNSRIFPAAQAENNLVRRTNRQGRRLTRRKKHRRVRLNRLFEESGLITDFTKISINLNPYQLRVKGLTDELSNEELFIALKNMVKHRGISYLDDASDDGNSSVGDYAQIVKENSKQLETKTPGQIQLERYQTYGQLRGDFTVEKDGKKHRLINVFPTSAYRSEALRILQTQQEFNPQITDEFVNRYLEILTGKRKYYHGPGNEKSRTDYGRYRTNGETLDNIFGILIGKCTFYPEEFRAAKASYTAQEFNLLNDLNNLTVPTETKKLSKEQKNQIINYVKNEKAMGPAKLFKYIAKLLSCDVADIKGYRIDKSGKAEIHTFEAYRKMKTLETLDIEQMDRETLDKLAYVLTLNTEREGIQEALEHEFADGSFSQKQVDELVQFRKANSSIFGKGWHNFSVKLMMELIPELYETSEEQMTILKRLGKQKTTSSSNKTKYIDEKLLTEEIYNPVVAKSIRQAIKIVNAAIKEYGDFDNIVIEMARETNEDDEKKAIQKIQKANKDEKDAAMLKAANQYNGKAELPHSVFHGHKQLATKIRLWHQQGERCLYTGKTISIHDLINNPNQFEVDHILPLSITFDDSLANKVLVYATANQEKGQRTPYQALDSMDDAWSFRELKAFVRESKTLSNKKKEYLLTEEDISKFDVRKKFIERNLVDTRYASRVVLNALQEHFRAHKIDTKVSVVRGQFTSQLRRHWGIEKTRDTYHHHAVDALIIAASSQLNLWKKQKNTLVSYSEDQLLDIETGELISDDEYKESVFKAPYQHFVDTLKSKEFEDSILFSYQVDSKFNRKISDATIYATRQAKVGKDKKDETYVLGKIKDIYTQDGYDAFMKIYKKDKSKFLMYRHDPQTFEKVIEPILENYPNKEMNEKGKEVPCNPFLKYKEEHGYIRKYSKKGNDPEIKSLKYYDSKLGNHIDITPKDSNNKVVLQSVSPWRADVYFNKTTGKYEILGLKYADLQFEKGTGTYKISQEKYNDIKKKEGVDSDSEFKFTLYKNDLLLVKDTETKEQQLFRFLSRTMPKQKHYVELKPYDKQKFEGGEALIKVLGNVANSGQCKKGLGKSNISIYKVRTDVLGNQHIIKNEGDKPKLDF

SEQ ID NO: 783 - protein, 1122 aa, Streptococcus thermophilus
MSDLVLGLDIGIGSVGVGILNKVTGEIIHKNSRIFPAAQAENNVERRTNRQGRRLTRRKKHRRVRLNRLFEESGLITDFTKISINLNPYQLRVRGLTDELSNEELFIALKNMVKHRGISYLDDASDDGNSSVGDYAQIVKENSKQLETKTPGQIQLERYQTYGQLRGDFTVEKDGKKHRLINVFPTSAYRSEALRILQTQQEFNSQITDEFINRYLEILTGKRKYYHGPGNEKSRTDYGRYRTSGETLDNIFGILIGKCTFYPEEFRAAKASYTAQEFNLLNDLNNLTVPTETKKLSKEQKNQIINYVKNEKAMGPAKLFKYIAKLLSCDVADIKGYRIDKSGKAEIHTFEAYRKMKTLETLDIEQMDRETLDKLAYVLTLNTEREGIQEALEHEFADGSFSQKQVDELVQFRKASSSIFGKGWHNFSVKLMMELIPELYETSEEQMTILTRLGKQKTTSSSNKTKYIDEKLLTEEIYNPVVAKSVRQAIKIVNAAIKEYGDFDNIVIEMARETNEDDEKKAIQKIQKANKDEKDAAMLKAANQYNGKAELPHSVFHGHKQLATKIRLWHQQGERCLYTGKTISIHDLINNPNQFEVDHILPLSITFDDSLANKVLVYATANQEKGQRTPYQALDSMDDAWSFRELKAFVRESKTLSNKKKEYLLTEEDISKFDVRKKFIERNLVDTRYASRVVLNALQEHFRAHKIDTKVSVVRGQFTSQLRRHWGIEKTRDTYHHHAVDALIIAASSQLNLWKKQKNTLVSYSEDQLLDIETGELISDDEYKESVFKAPYQHFVDTLKSKEFEDSILFSYQVDSKFNRKLSDATIYATRQAKVGKDKKDETYVLGKIKDIYTQDGYDAFMKIYKKDKSKFLMYRHDPQTFEKVIEPILENYPNKEMNEKGKEVPCNPFLKYKEEHGYIRKYSKKGNGPEIKSLKYYDSKLLGNPIDITPENSKNKVVLQSLKPWRADVYFNKTTGKYEILGLKYADLQFEKKTGTYKISQEKYNGIMKEEGVDSDSEFKFTLYKNDLLLVKDTETKEQQLFRFLSRTMPNVKYYVELKPYSKDKFEKNESLIEILGSADKSGRCIKGLGKSNISIYKVRTDVLGNQHIIKNEGDKPKLDF

SEQ ID NO: 784 - protein, 1388 aa, Streptococcus thermophilus
MTKPYSIGLDIGTNSVGWAVITDNYKVPSKKMKVLGNTSKKYIKKNLLGVLLFDSGITAEGRRLKRTARRRYTRRRNRILYLQEIFSTEMATLDDAFFQRLDDSFLVPDDKRDSKYPIFGNLVEEKAYHDEFPTIYHLRKYLADSTKKADLRLVYLALAHMIKYRGHFLIEGEFNSKNNDIQKNFQDFLDTYNAIFESDLSLENSKQLEEIVKDKISKLEKKDRILKLFPGEKNSGIFSEFLKLIVGNQADFRKCFNLDEKASLHFSKESYDEDLETLLGYIGDDYSDVFLKAKKLYDAILLSGFLTVTDNETEAPLSSAMIKRYNEHKEDLALLKEYIRNISLKTYNEVFKDDTKNGYAGYIDGKTNQEDFYVYLKNLLAEFEGADYFLEKIDREDFLRKQRTFDNGSIPYQIHLQEMRAILDKQAKFYPFLAKNKERIEKILTFRIPYYVGPLARGNSDFAWSIRKRNEKITPWNFEDVIDKESSAEAFINRMTSFDLYLPEEKVLPKHSLLYETFNVYNELTKVRFIAESMRDYQFLDSKQKKDIVRLYFKDKRKVTDKDIIEYLHAIYGYDGIELKGIEKQFNSSLSTYHDLLNIINDKEFLDDSSNEAIIEEIIHTLTIFEDREMIKQRLSKFENIFDKSVLKKLSRRHYTGWGKLSAKLINGIRDEKSGNTILDYLIDDGISNRNFMQLIHDDALSFKKKIQKAQIIGDEDKGNIKEVVKSLPGSPAIKKGILQSIKIVDELVKVMGGRKPESIVVEMARENQYTNQGKSNSQQRLKRLEKSLKELGSKILKENIPAKLSKIDNNALQNDRLYLYYLQNGKDMYTGDDLDIDRLSNYDIDHIIPQAFLKDNSIDNKVLVSSASNRGKSDDFPSLEVVKKRKTFWYQLLKSKLISQRKFDNLTKAERGGLLPEDKAGFIQRQLVETRQITKHVARLLDEKFNNKKDENNRAVRTVKIITLKSTLVSQFRKDFELYKVCEINDFHHAHDAYLNAVIASALLKKYPKLEPEFVYGDYPKYNSFRERKSATEKVYFYSNIMNIFKKSISLADGRVIERPLIEVNEETGESVWNKESDLATVRRVLSYPQVNVVKKVEEQNHGLDRGKPKGLFNANLSSKPKPNSNENLVGAKEYLDPKKYGGYAGISNSFAVLVKGTIEKGAKKKITNVLEFQGISILDRINYRKDKLNFLLEKGYKDIELIIELPKYSLFELSDGSRRMLASILSTNNKRGEIHKGNQIFLSQKFVKLLYHAKRISNTINENHRKYVENHKKEFEELFYYILEFNENYVGAKKNGKLLNSAFQSWQNHSIDELCSSFIGPTGSERKGLFELTSRGSAADFEFLGVKIPRYRDYTPSSLLKDATLIHQSVTGLYETRIDLAKLGEG

SEQ ID NO: 785 - protein, 1388 aa, Streptococcus thermophilus
MTKPYSIGLDIGTNSVGWAVITDNYKVPSKKMKVLGNTSKKYIKKNLLGVLLFDSGITAEGRRLKRTARRRYTRRRNRILYLQEIFSTEMATLDDAFFQRLDDSFLVPDDKRDSKYPIFGNLVEEKAYHDEFPTIYHLRKYLADSTKKADLRLVYLALAHMIKYRGHFLIEGEFNSKNNDIQKNFQDFLDTYNAIFESDLSLENSKQLEEIVKDKISKLEKKDRILKLFPGEKNSGIFSEFLKLIVGNQADFRKCFNLDEKASLHFSKESYDEDLETLLGYIGDDYSDVFLKAKKLYDAILLSGFLTVTDNETEAPLSSAMIKRYNEHKEDLALLKEYIRNISLKTYNEVFKDDTKNGYAGYIDGKTNQEDFYVYLKNLLAEFEGADYFLEKIDREDFLRKQRTFDNGSIPYQIHLQEMRAILDKQAKFYPFLAKNKERIEKILTFRIPYYVGPLARGNSDFAWSIRKRNEKITPWNFEDVIDKESSAEAFINRMTSFDLYLPEEKVLPKHSLLYETFNVYNELTKVRFIAESMRDYQFLDSKQKKDIVRLYFKDKRKVTDKDIIEYLHAIYGYDGIELKGIEKQFNSSLSTYHDLLNIINDKEFLDDSSNEAIIEEIIHTLTIFEDREMIKQRLSKFENIFDKSVLKKLSRRHYTGWGKLSAKLINGIRDEKSGNTILDYLIDDGISNRNFMQLIHDDALSFKKKIQKAQIIGDEDKGNIKEVVKSLPGSPAIKKGILQSIKIVDELVKVMGGRKPESIVVEMARENQYTNQGKSNSQQRLKRLEKSLKELGSKILKENIPAKLSKIDNNALQNDRLYLYYLQNGKDMYTGDDLDIDRLSNYDIDHIIPQAFLKDNSIDNKVLVSSASNRGKSDDFPSLEVVKKRKTFWYQLLKSKLISQRKFDNLTKAERGGLLPEDKAGFIQRQLVETRQITKHVARLLDEKFNNKKDENNRAVRTVKIITLKSTLVSQFRKDFELYKVREINDFHHAHDAYLNAVIASALLKKYPKLEPEFVYGDYPKYNSFRERKSATEKVYFYSNIMNIFKKSISLADGRVIERPLIEVNEETGESVWNKESDLATVRRVLSYPQVNVVKKVEEQNHGLDRGKPKGLFNANLSSKPKPNSNENLVGAKEYLDPKKYGGYAGISNSFAVLVKGTIEKGAKKKITNVLEFQGISILDRINYRKDKLNFLLEKGYKDIELIIELPKYSLFELSDGSRRMLASILSTNNKRGEIHKGNQIFLSQKFVKLLYHAKRISNTINENHRKYVENHKKEFEELFYYILEFNENYVGAKKNGKLLNSAFQSWQNHSIDELCSSFIGPTGSERKGLFELTSRGSAADFEFLGVKIPRYRDYTPSSLLKDATLIHQSVTGLYETRIDLAKLGEG

SEQ ID NO: 786 - protein, 595 aa, Streptococcus thermophilus
MVQFRKANSSIFGKGWHNFSVKLMMELIPELYETSEEQMTILKRLGKQKTTSSSNKTKYIDEKLLTEEIYNPVVAKSVRQAIKIVNAAIKEYGDFDNIVIEMARETNEDDEKKAIQKIQKANKDEKDAAMLKAANQYNGKAELPHSVFHGHKQLATKIRLWHQQGERCLYTGKTISIHDLINNPNQFEVDHILPLSITFDDSLANKVLVYATANQEKGQRTPYQALDSMDDAWSFRELKAFVRESKTLSNKKKEYLLTEEDISKFDVRKKFIERNLVDTRYASRVVLNALQEHFRAHKIDTKVSVVRGQFTSQLRRHWGIEKTRDTYHHHAVDALIIAASSQLNLWKKQKNTLVSYSEDQFLDIETGELISDDEYKESVFKAPYQHFVDTLKSKEFEDSILFSYQVDSKFNRKISDATIYATRKAKLDKEKKEYTYTLGKIKDIYTQAGYDAFIKIYKKDKSKFLMYHHDPQTFEKVIEPILENYPNKEINEKGKEVPCNPFLKYKEEHGYIRKYSKKGNGPEIKSFKYYDNLLGRHIDITPKNSKNIVALRKLNPWRTDVYFNHETMKYEFLGLKYADISYKKSKNKAGDFLPK

SEQ ID NO: 787 - protein, 1388 aa, Streptococcus thermophilus]
MTKPYSIGLDIGTNSVGWAVITDNYKVPSKKMKVLGNTSKKYIKKNLLGVLLFDSGITAEGRRLKRTARRRYTRRRNRILYLQEIFSTEMATLDDAFFQRLDDSFLVPDDKRDSKYPIFGNLVEEKVYHDEFPTIYHLRKYLADSTKKADLRLVYLALAHMIKYRGHFLIEGEFNSKNNDIQKNFQDFLDTYNAIFESDLSLENSKQLEEIVKDKISKLEKKDRILKLFPGEKNSGIFSEFLKLIVGNQADFRKCFNLDEKASLHFSKESYDEDLETLLGYIGDDYSDVFLKAKKLYDAILLSGFLTVTDNETEAPLSSAMIKRYNEHKEDLALLKEYIRNISLKTYNEVFKDDTKNGYAGYIDGKTNQEDFYVYLKNLLAEFEGADYFLEKIDREDFLRKQRTFDNGSIPYQIHLQEMRAILDKQAKFYPFLAKNKERIEKILTFRIPYYVGPLARGNSDFAWSIRKRNEKITPWNFEDVIDKESSAEAFINRMTSFDLYLPEEKVLPKHSLLYETFNVYNELTKVRFIAESMRDYQFLDSKQKKDIVRLYFKDKRKVTDKDIIEYLHAIYGYDGIELKGIEKQFNSSLSTYHDLLNIINDKEFLDDSSNEAIIEEIIHTLTIFEDREMIKQRLSKFENIFDKSVLKKLSRRHYTGWGKLSAKLINGIRDEKSGNTILDYLIDDGISNRNFMQLIHDDALSFKKKIQKAQIIGDEDKGNIKEVVKSLPGSPAIKKGILQSIKIVDELVKVMGGRKPESIVVEMARENQYTNQGKSNSQQRLKRLEKSLKELGSKILKENIPAKLSKIDNNALQNDRLYLYYLQNGKDMYTGDDLDIDRLSNYDIDHIIPQAFLKDNSIDNKVLVSSASNRGKSDDFPSLEVVKKRKTFWYQLLKSKLISQRKFDNLTKAERGGLLPEDKAGFIQRQLVETRQITKHVARLLDEKFNNKKDENNRAVRTVKIITLKSTLVSQFRKDFELYKVREINDFHHAHDAYLNAVIASALLKKYPKLEPEFVYGDYPKYNSFRERKSATEKVYFYSNIMNIFKKSISLADGRVIERPLIEVNEETGESVWNKESDLATVRRVLSYPQVNVVKKVEEQNHGLDRGKPKGLFNANLSSKPKPNSNENLVGAKEYLDPKKYGGYAGISNSFAVLVKGTIEKGAKKKITNVLEFQGISILDRINYRKDKLNFLLEKGYKDIELIIELPKYSLFELSDGSRRMLASILSTNNKRGEIHKGNQIFLSQKFVKLLYHAKRISNTINENHRKYVENHKKEFEELFYYILEFNENYVGAKKNGKLLNSAFQSWQNHSIDELCSSFIGPTGSERKGLFELTSRGSAADFEFLGVKIPRYRDYTPSSLLKDATLIHQSVTGLYETRIDLAKLGEG

SEQ ID NO: 788 - protein, 1038 aa, Streptococcus vestibularis
MIDELSNEELFIALKNMVKHRGISYLDDASDDGNSSVGDYAQIVKENSKQLETKTPGQIQLERYQKYGQLRGDFTVEEDGKKHRLINVFPTSAYRAEALRILQTQQEFNSQITDEFINRYLEILTGKRKYYHGPGNEKSRTDYGRYRTSGETLDNIFGILIGKCTFYPEEFRAAKASYTAQEFNLLNDLNNLTVPTETKKLSEEQKNQIINYVKNEKAMGPAKLFKYIAKLLSCDIADIKGYRIDKSDKAEIHTFEAYRKMKTLETIDIEKMSREELDKLAYVLTLNTEREGIQEALEHEFVDGNFSQEQIDELVQFRKANSSIFGKGWHNFSVKLMMELIPELYATSEEQMTILTRLGKQKTTSSSNKTKYIDEKLLTEEIYNPVVAKSVRQAIKIVNAAIKEYGDFDNIVIEMARATNEDDEKKAIQKIQKANKDEKDAAMLKAANQYNGKAELPHSVFHGHKQLATKIRLWHQQGERCLYTGKTISIHDLINNPNQFEIDHILPLSITFDDSLANKVLVYATANQEKGQRTPYQALDSMDDAWSFRELKAFVRESKTLSNKKKEYLLTEEDISKFDVRKKFIERNLVDTRYASRVVLNALQEHFRAHKIDTKVSVVRGQFTSQLRRHWGIEKTRDTYHHHAVDALIIAASSQLNLWKKQKNTLVNYSENQLLDIETGELISDDEYKESVFKAPYQHFVDTLKSKEFEDSILFSYQVDSKFNRKISDATIYATRKAKLDKEKKEYTYTLGKIKDIYALGTKTPSKTGFYKFLDLYKKNKSQFLMYQKDRKTWDEVIEKILEQYRPFKEKDKNGKEVDFNPFEKYRIENGPIRKYSRKGNGPEIKSLKYYDNLLGRFVDITPSESKNPVALLSLNPWRTDVYYNTETRKYEFLGLKYADLCFEKGGSYGISKVKYNKIREKEGIGKNSEFKFTLYKNDLILIKDTETNRQQVFRFWSRTGKDNPKRFEKHKIELKPYEKARFEKGEELEVLGKVPPSSNQLQKNMQIENLSIFKVRTDVLGNQHIIKNEGDKPKLDF

SEQ ID NO: 789 - protein, 97 aa, Streptococcus vestibularis
MSDLVLGLDIGIGSVGVGILNKVTGEIIHKNSRIFPAAQAENNVERRTNRQGRRLTRRKKHRRVRLNHLFEESGLITDFTKVSINLNPYQLRVKIDR

SEQ ID NO: 790 - protein, 1084 aa, Unknown
  Subdoligranulum sp.
MKNTLYGIGLDIGVASVGWAVVGLNGTGEPVGLHRLGVRIFDKAEQPKTGESLAAPRRMARGMRRRLRRKALRRADVYALLERSGLSTREELAQMFEAGGLEDIYALRTRALDEPVGKAEFSRILLHLAQRRGFKSNRRTASDGEDGRLLAAVNENRRRMAQGGWRTVGEMLYRHEAFALHKRNKADDYLSTVGRDMVAEEASILFERQRAMGCSWAAPELQAEYLSILLRQRSFDEGPGGNSPYGGNQVEKMVGRCTFEPDEPRAAKAAYSFEYFSLLQKLNHIRLAENGETRPLTQPQRQQLLSLAHKTPDISLARIRKELALPETVQFNGVRCRANETLEESEKKEKFACLPAYHKMRKALDGVVKGRISSLSISQRDAAATALSLYKNEDTLRAKLTEAGFQAPEIDALAGLTGFSKFGHLSLKACRKLIPHLEQGLTYDQACTAAGYDFKGHGAGERAFTLPAAAPEMEQITSPVVRRAVAQTIKVVNGIIREMDASPAWVRIELARELSKTFGERQEMDRSMRENAAQNERLMQELRDTFHLLSPTGQDLVKYRLWKEQDGVCAYSLRRLDVERLFEPGYVDVDHIVPYSLSFDDRRSNKVLVLSSENRQKGNRLPLQYLQGKRREDFIVWTNSSVHDYRKRQNLLREKLSGDEAEGFRQRNLQDTQHMARFLYNYISDHLAFAQSEALGKKRVFAVSGAVTSHLRKRWGLSKVRADGDLHHALDAAVVACTTDGMIRRISGYYGHIEGEYLQDADGAGSQHARTKERFPAPWPRFRDELIVRLSEQPAEPLLDINPEFYCEYGTEHIRPVFVSRMPRRKVTGPGHKETIKGAAAADEGLLTVRKALTELKLDKDGEIKDYYMPSSDTLLYEALKAQLRRFGGDGKKAFAEPFYKPKADGTPGPLVRKVKTTEKATLTVPVHGGAASNDTMVRVDVFLVPGDGYYWVPVYTADTLKPELPNRAVVQGKPYSEWKEMREEDFIFSLYPNDLVYVEHKSGLKFTLQNADSTLEKTRTQTSAFAYFVSGSISTASITIRTHDNAYGIPSLGVKTLKTFHKYQVDVLGNVFPVHKETRQKFR

SEQ ID NO: 791 - protein, 951 aa, Sutterella parvirubra
MPTVRPVFHSSASFDLGAKNTGLFLVNHPAGAAPSAEYAAAYTIVQPADGDGLNYSTTNRRAVRHRLRGGKRFKLARRLVLQVIDALRKLKPGLIRDEEMRRTVEALSSLLKRRGFTRIESEAQVDPTTLDSVDPAVFADHETLGGFFSLGIPISTQWDALSQNPGAVEQLFKALPSAKDFGKYVTEQFPEFAEQKKLYADAIKVLSSEAKSIVMQLGLGHHHRSKYFEMIAHDMLRDPRLQGVFELFGSEERFKTFICNVSNLQLRALRWYFDEPNPEVANQWNPEKFQVVWLRGLKYFHPDAERKADMKKLIDELTASKDILDALCTTDPRRTIPPYEDQNNRRPPFDQTLWLSAAELTRRYGDKWRIWSQKFERADRALSTGLDEILLYTDRRSRMFNRNQDPSVYADSYVLQRVLDRSSKLDRYALRALAAGYRTQELHEPLATLSDTLGTQHVETFLTFAAEYYEEVAAAKNGLWLDGPSRLLERADIHPPMKKKVLDLLLGNILDATPEIGRILRTVLWNRHVHEKSRSTPASLCRSIEAIRKDFGGEFRMRYDALDAKIRAAEDQKKKFKPTNAEEKDLFKAWNATKTMHAFLRDVLQLTPKQLERTASPYVFAQLHTLIDTERDGFTSTSLAAHLENHWRMRANAAGMAQCSRLPADAVRPFDGVLSKALDRQAFEAAKLAAQHLMSRKELTDTDIRYSIIIESNRFAFSASTAELKKNTLAKKNAEKGLNFELKRWQDKDSRIREASRGICAYTGAKLGDVVEYDHIIPRAFTTSAMGSVFNSEANLICVSRPGNQTKADKRYGLNKLHKTYLTAVFGTADVTTIAASIEDIVGKLASANRLRHFELLNEKEQDAVRHALFLDDESDARRIVLRELAAQNKSRVNGTQAWFVRAFMTKLLEITKDWRERTGNTLDIRSWKTDAEVASRLRSALNFHAEITLT

SEQ ID NO: 792 - protein, 406 aa, Sutterella parvirubra
SNLFREEVPYGDHFLPIIQMKNRIYIGYQLPKADGTGGNAVAVLGKDPLELLETLKPFLDREPQAFSDHPVTYKMINERAYELLTKCALTPDQTTELERTQAEVLRSLNYQTSRAAVLGRLVDDKNKFVAKDAVWKEKDFVISFKLSPKKSAFKASGQLELPAKSDWKALVDSPELAINWGQPADDTFSQRIERKVRMNSSHLEHTPKKRVVSLPVVDKPSGGFRIRRHNLDGSAVFQVHTVANNKYGGFSADSAGKVDWSTPVLCGHLQHANLVPLDPETASAEQLVRMSEWRVVETTSDIRLEVCPGTSGRRYVRVELPFTLLQEWLTAGKVADVPVSPLHLPGSIKLTDPKTFCAEAQKTLSIFAQPRATIFFEQLGDRVRFRFEASGGPATMNAAYNAAGRS

SEQ ID NO: 793 - protein, 389 aa, Sutterella wadsworthensis
MKACDLEEKTNHLQACVAIDLGARYTGTFSILHKSSHLPSKDDCRAATYVLPEDGGKMTYSQRNRTAVRHRIRGKKRFALARRMAMLIIREKLAAKSVTLTSSETRRLAEAVGSLLRRRGYNRLETETDNDLTVLENIEPEVFSEHEILGKYFYAGTDLAIQWETLSQDLSKISSLLAERLSEKDFKKYLTGLIPDDKNKIKHIISVFKMLIDEAESINMQCVLGHKHRTQYLSDIHADMHRDTRLSKAAEAFGGVDRLWRLLGNLSNLQLRAHRWYFNAPHLFDDQALEPARLQKTLVRAFKYLHCPQGVESRAQAELVKELEEADDIIDALCTIDPVRTIPPYENQQNRRPPFDQTLYLSPDLGVSGFLCLGRLFQGQPNEAALCFL

SEQ ID NO: 794 - protein, 976 aa, Unknown
  Tannerella sp.
MKKILGLDLGSNSIGWALVNEAENRDEASSIIKLGVRVNPLTVDEMQNFEKGKSITTNADRTLKRSMRRNLQRYKLRRDALIKLLKKVGFITDGTILSEQGNRTTFETYRLRAKAPDEEISLQELARVLLMINKKRGYKSSRKIKEKEAGTLIDGMEVAKKLYDEDLTPGQLCLQLLESGKKSLPDFYSSDLQEEFDRIWNFQKQFNPKAFCDTAKEEIKGKNKSQTWAILAKYFIWMEEMDVWNEKESKTERVEKECKLVGLKRTVKKEEQRKENYCWRVQALTEQLDLEKVAVVLQEINGQISTSSGYLGAISDRSKVLYFNRQTVGQYQMAELEKNPNTSLRNMVFYRQDYLDEFDKIWEKQAEFHKELTVELKKEIRDIIIFYQRRLKSQKGLIGFCEFENREIMVEKNGKMQAKVVGCKVIPRSHPLFQEFKIWQTLNNVEVFAGEKKCKRKRTDAFPGLFDGTEDTLMVEGWRYLYQEEKEILAKELSVKKSLKKEYILKLLFDNPQDLDMNFEQIEGNDTGNVLFSAYSKMIEKYGYEPLDFGKPTDKIIEQLQVIFADLGWNTDLLFVDLNKEGKDLEKQPYFKLWHLLYSFEGDNTPTGNGKLVEKLMELCHVGKECALELVNISFQNDYGSLSAKAIKKILPYLKEGNRYDVACGYAGYRHSKSSLTKEEIENKVLKDKLDILPKNSLRNPVVEKILNQMVNVINAIIDTYGKPDEIRVELARELKKSAKEREELTKAIAKSTREHEEIRKVLQEEFGMINVSRNDIIRYKLYKELKDNGYKTLYSNQDIPKEKVFSKEIDIEHIIPQARLFDDSLSNKTLEYKAINIEKGNKTAYDFVKEKYGEKGLQQYLNRCESLFKGHRTKLRKLKMGQENIPEGFIDRDLRNTQYIAKKALAMLNEICRRVVATTGSITDRLREDWQLVDVLKELRCFRYFKDTKMKANHNKNIFYTSIKVDVSDTSKILK

SEQ ID NO: 795 - protein, 1049 aa, Tistrella mobilis
MINERLTFGIDLGIGSCGWAVLRHADAAGEPGVIEGLGSWCFDVPETSKERIPTNQVRRSNRLLRRVIRRRRNRMAEIRRLFHAQGLLPSADEDALKRPRLDPWELRARGLDQCLSAEEFAVALGHIARHRGFRSSAKRKAANTSGEDSKMLSALLVTRERTARYRTVGEMFARDPEYSARRRNRDGIFDRTVARDDLIHEVGKLFEAQRARGSAFASPDLEADFNAIAFRQAEMQDSERLVGNCPFERDEKRAARWAPSFERFRLLTRLINLRIATAEGERRFTPEDLARVSAELGATAKLPVSRVRALIGLLPDERFTTIRVEDEDRDIVARTGEAAPGTWRLRKTLGEALWAEMQARPDQLDAIAHVLSFFEATAKIRSELDRLGLPAAVIEALDRGLEDGAFAKFKGAGHISAKACRNLLPHLQQGHRYDQACRLAGYDHAASTLSHTAQVVSKAGFNALVTELGESIANPIARKALTEGLKQIRAMCARWGLPGAIHIELAREVGNSIEKRRELESQRETTTKRRQTERDEIRGLLALEDVDDDTLLRYRLWKEQGGKCLYTGKDIHVRQLIATDNSVQVDHILPWSRFGDDSFNNKTLCLASANQRKRGQTPWEWFSLTGTPEAWEVFASRVETSKDLRGFKKRNLLLKNADEVAQRFRSRNLNDTRYAARLLAEAAKLFYPAGDRQEKDGRRRVLTRPGPLTAALRHAWGLESLKKADGKRVSDDRHHALDALAVAAISEREVQRLTRSFQEWEQQGLARPLRHVAPPWPGFRGDVLAAYAQAFVARPERRRARGKGHDASIRQVVGEGPEAQVFERRGLADLKEADLDRVKDPERNQAIIEAVRAWILAGRPADAPPRSPRGDVIVKLRTAPAKKIKPAVPVRGGTADRGDMVRIDVFTRPNRKGRDEWYLVPIYPHQVMNRKAWPHPPMRSVVAYKDEAGWTEIGAEHSFRFSLYPRSYVQLVKSNGDVIEGYLVSMDRSTGAFRVFVHNNPAEMAKGIGAKTLLNLRKFNVDRFGVRTEVKSEVRTWHGEVCTSPVPPD

SEQ ID NO: 796 - protein, 1395 aa, Treponema denticola
MKKEIKDYFLGLDVGTGSVGWAVTDTDYKLLKANRKDLWGMRCFETAETAEVRRLHRGARRRIERRKKRIKLLQELFSQEIAKIDEGFFQRMKESPFYAEDKTILQENALFNDKDFTDKTYHKAYPTINHLIKAWIENKVKPDPRLLYLACHNIIKKRGHFLFEGDFDSENQFDTSIQALFEYLREDMEVDIDADSQKVKEILKDSSLKNSEKQSRLNKILGLKPSDKQKKAITNLISGNKINFADLYDNPDLKDAEKNSISFSKDDFDALSDDLASILGDSFELLLKAKAVYNCSVLSKVIGDEQYLSFAKVKIYEKHKTDLTKLKAVIKKHFPNNYKKVFGYNQDNESKNNYSGYVGVCKTKNKKLVINNSVNQEDFYKFLKPILSAKSEIKEVNDILAEIETGNFLPKQISKSNAEIPYQLRKMELEKILSNAEKHFSFLKQKDEKGLSHSEKIIMLLTFKIPYYIGPINDNHKKSFPDRCWVVKKEKSPSGKTTPWNFFDHIDKEKTAEEFITSRTNFCTYLIGESVLPKNSLLYSEYTVLNEINNLQIIIDGKNICDTKLKQKIYEDLFKKYKKITQKQISTFIKHEGICNKTDEVIILGIDKECTSSLKSYIELKNIFGKQVDEISTKNMLEEIIRWATIYDEGEGKTILKTKIKAEYGKYCSDEQIKKILNLKFSGWGRLSRKFLETVTSEMPGFSEPVNIITAMRETQNNLMELLSSEFKFTENIKKINSGFEDAEKQFSYDGLVKPLFLSPSVKKMLWQTLKLVKEISHITQAPPKKIFIEMAKGAELEPARTKTRLKILQDLYSSCKNDADAFSSEIQYLSGKIENEDNLRLRSDKLYLYYTQLGKCMYCGKPIEIGHVFDTSNYDIDHIYPQSKIKDDSISNRVLVCSSCNKNKEDKYPLKSEIQSKQRGFWNFLQRNNFISLEKLNRLTRTTPISDDETAKFIARQLVETRQATKVAAKVLEKMFPETKIVYSKAETVSMFRNKFDIIKCREINDFHHAHDAYLNIVVGNVYNTKFTNNPWNFIKEKRDNPKIADTYNYYKVFDYDVKRNNITAWEKGKTIITVKDMLKRNTPIYTRQAACKKGGLFDQTIMKKGLGQHPLKKEGPFSNISKYGGYNKVSAAYYTLIEYEEKGNKIRSLETIPLYLVKDIQKDQDVLKSYLTDLLGKKEFKILVPKIKINSLLKINGFPCHITGKTNDSFLLRPAVQFCCSNDEVLYFKKIIRFSEIRSQREKIGKTISPYEDLSFRSYIKENLCKKTKNDEIGEKEFYDLLQKKNLEIYDMLLTKHKDTIYKKRPNSATIDILVKGKEKFKSLIIENQFEVILEILKLFSATRNVSELQHIGGSKYSGVAKIGNKISSLDNCILIYQSITGIFEKRIDLLKV

SEQ ID NO: 797 - protein, 769 aa, Treponema denticola
MKKEIKDYFLGLDVGTGSVGWAVTDTDYKLLKANRKDLWGMRCFETAETAEVRRLHRGARRRIERRKKRIKLLQELFSQEIAKIDEGFFQRMKESPFYAEDKTILQENALFNDKDFTDKTYHKAYPTINHLIKAWIENKVKPDPRLLYLACHNIIKKRGHFLFEGDFDSENQFDTSIQALFEYLREDMEVDIDADSQKVKEILKDSSLKNSEKQSRLNKILGLKPSDKQKKAITNLISGNKINFADLYDNPDLKDAEKNSISFSKDDFDALSDDLASILGDSFELLLKAKAVYNCSVLSKVIGDEQYLSFAKVKIYEKHKTDLTKLKAVIKKHFPNNYKKVFGYNQDNESKNNYSGYVGVCKTKNKKLVINNSVNQEDFYKFLKPILSAKSEIKEVNDILAEIETGNFLPKQISKSNAEIPYQLRKMELEKILSNAEKHFSFLKQKDEKGLSHSEKIIMLLTFKIPYYIGPINDNHKKSFPDRCWVVKKEKSPSGKTTPWNFFDHIDKEKTAEEFITSRTNFCTYLIGESVLPKNSLLYSEYTVLNEINNLQIIIDGKNICDTKLKQKIYEDLFKKYKKITQKQISTFIKHEGICNKTDEVIILGIDKECTSSLKSYIELKNIFGKQVDEISTKNMLEEIIRWATIYDEGEGKTILKTKIKAEYGKYCSDEQIKKILNLKFSGWGRLSRKFLETVTSEMPGFSEPVNIITAMRETQNNLMELLSSEFKFTENIKKINSGFEDAEKQFSYDGLVKPLFLSPSVKKCCGRL

SEQ ID NO: 798 - protein, 1395 aa, Treponema denticola
MKKEIKDYFLGLDVGTGSVGWAVTDTDYKLLKANRKDLWGMRCFETAETAEVRRLHRGARRRIERRKKRIKLLQELFSQEIAKIDEGFFQRMKESPFYAEDKTILQENALFNDKDFTDKTYHKAYPTINHLIKAWIENKVKPDPRLLYLACHNIIKKRGHFLFEGDFDSENQFDTSIQALFEYLREDMEVDIDADSQKVKEILKDSSLKNSEKQSRLNKILGLKPSDKQKKAITNLISGNKINFADLYDNPDLKDAEKNSISFSKDDFDALSDDLASILGDSFELLLKAKAVYNCSVLSKVIGDEQYLSFAKVKIYEKHKTDLTKLKAVIKKHFPNNYKKVFGYNQDNESKNNYSGYVGVCKTKNKKLVINNSVNQEDFYKFLKPILSAKSEIKEVNDILAEIETGNFLPKQISKSNAEIPYQLRKMELEKILSNAEKHFSFLKQKDEKGLSHSEKIIMLLTFKIPYYIGPINDNHKKSFPDRCWVVKKEKSPSGKTTPWNFFDHIDKEKTAEEFITSRTNFCTYLIGESVLPKNSLLYSEYTVLNEINNLQIIIDGKNICDTKLKQKIYEDLFKKYKKITQKQISTFIKHEGICNKTDEVIILGIDKECTSSLKSYIELKNIFGKQVDEISTKNMLEEIIRWATIYDEGEGKTILKTKIKAEYGKYCSDEQIKKILNLKFSGWGRLSRKFLETVTSEMPGFSEPVNIITAMRETQNNLMELLSSEFKFTENIKKINSGFEDAEKQFSYDGLVKPLFLSPSVKKMLWQTLKLVKEISHITQAPPKKIFIEMAKGAELEPARTKTRLKILQDLYSSCKNDADAFSSEIQYLSGKIENEDNLRLRSDKLYLYYTQLGKCMYCGKPIEIGHVFDTSNYDIDHIYPQSKIKDDSISNRVLVCSSCNKNKEDKYPLKSEIQSKQRGFWNFLQRNNFISLEKLNRLTRTTPISDDETAKFIARQLVETRQATKVAAKVLEKMFPETKIVYSKAETVSMFRNKFDIIKCREINDFHHAHDAYLNIVVGNVYNTKFTNNPWNFIKEKRDNPKIADTYNYYKVFDYDVKRNNITAWEKGKTIITVKDMLKRNTPIYTRQAACKKGELFNQTIMKKGLGQHPLKKEGPFSNISKYGGYNKVSAAYYTLIEYEEKVNKIRSLETIPLYLVKDIQKDQDVLKSYLTDLLGKKEIKILVPKIKINSLLKINGFPCHITGKTGDSFVLRPAVQFCCSNDEVLYFKKIIRFNEIRSQREKMGKTISPYEDLSFRSYIKENLCKKTKADEIGEKEFYDLLQKKNLEIYDMLLTKHKDTIYNKRPNSTTLGMLTKGRYEFINLKPKDQIIVMLEILKLFCTTREAIDLGLIKGKPAAGVATLGKKISNLDNCILIYQSITGIFEKRIDLLKV

SEQ ID NO: 799 - protein, 1395 aa, Treponema denticola
MKKEIKDYFLGLDVGTGSVGWAVTDTDYKLLKANRKDLWGMRCFETAETAEVRRLHRGARRRIERRKKRIKLLQELFSQEIAKIDEGFFQRMKESPFYAEDKTILQENTLFNDKDFTDKTYHKAYPTINHLIKAWIENKVKPDPRLLYLACHNIIKKRGHFLFEGDFDSENQFDTSIQALFEYLREDMEVDIDADSQKVKEILKDSSLKNSEKQSRLNKILGLKPSDKQKKAITNLISGNKINFADLYDNPDLKDAEKNSISFSKDDFDALSDDLASILGDSFELLLKAKAVYNCSVLSKVIGDEQYLSFAKVKIYEKHKTDLTKLKNVIKKHFPKDYKKVFGYNKNEKNNNNYSGYVGVCKTKSKKLIINNSVNQEDFYKFLKTILSAKSEIKEVNDILTEIETGTFLPKQISKSNAEIPYQLRKMELEKILSNAEKHFSFLKQKDEKGLSHSEKIIMLLTFKIPYYIGPINDNHKKSFPDRCWVIKKEKSPSGKTTPWNFFDHIDKDKTAEAFITSRTNFCTYLVGESVLPKSSLLYSEYTVLNEINNLQIIIDGKNICDIKLKQKIYEELFKKYKKITQKQISTFIKHEGICNKTDEVIILGIDKECTSSLKSYIELKNIFGKQVDEISTKNMLEEIIRWATIYDEGEGKTILKTKIKAEYGKYCSDEQIKKILNLKFSGWGRLSRKFLETVTSEMPGFSEPVNIITAMRETQNNLMELLSSEFKFTENIKKINSGFEDAEKQFSYNGLVKPLFLSPSVKKMLWQTLKLVKEISHITQAPPKKIFIEMAKGAELEPARTKTRLKILQDLYNNCKNDADAFSSEIKDLSGKIENEDNLRLRSDKLYLYYTQLGKCMYCGKPIEIGHVFDTSNYDIDHIYPQSKIKDDSISNRVLVCSSCNKNKEDKYPLKSEIQSKQRGFWNFLQRNNFISLEKLNRLTRTTPISDDETAKFIARQLVETRQATKVAAKVLEKMFPETKIVYSKAETVSMFRNKFDIIKCREINDFHHAHDAYLNIVVGNVYNTKFTNNPWNFIKEKRDNPKIADTYNYYKVFDYDVKRNNITAWEKGKTIITVKDMLKRNTPIYTRQAACKKGGLFDQTIMKKGLGQHPLKKEGAFSNISKYGGYNKVSAAYYTLIEYEEKGNKIRSLETIPLYLVKDIQKDQDVLKSYLTDLLGKKEIKILVPKIKINSLLKINGFPCHITGKTGDSFVLRPAVQFCCSNDEVLYFKKIIRFNEIRSQREKMGKTISPYEDLSFRSYIKENLCKKTKADEIGEKEFYDLLQKKNLEIYDMLLTKHKDTIYNKRPNSTTLGMLTKGRYEFINLKPKDQIIVMLEILKLFCTTREAIDLGLIKGKPAAGVATLGKKISNPDNCILIYQSITGIFEKRIDLLKV

SEQ ID NO: 800 - protein, 1395 aa, Treponema denticola
MKKEIKDYFLGLDVGTGSVGWAVTDTDYKLLKANRKDLWGMRCFETAETAEVRRLHRGARRRIERRKKRIKLLQELFSQEIAKIDEGFFQRMKESPLYAEDKTILQENTLFNDKDFTDKTYHKAYPTINHLIKAWIENKVKPDPRLLYLACHNIIKKRGHFLFEGDFDSENQFDTSIQALFEYLREDMELDIDADSQKVKEILKDSSLKNSEKQSRLNKMLGLKPSDKQKKAITNLISGNKINFADLYDNPDLKDAEKNSISFSKDDFDALSDDLASILGDSFELLLKAKAVYNCSVLSKVIGDEQYLSFAKVKIYEKHKTDLTKLKNVIKKHFPKDYKKVFGYNKNEKNNNNYSAYVGVCKITHKKLVIKNSASQEDFYKFLKTILSAKSEIKEVNDILTEIETGTFLPKQISKSNAEIPYQLRKMELEKILSNAEKHFSFLKQKDEKGLSHSEKIIMLLTFKIPYYIGPINDNHKKSFPDRCWVVKKEKSPSGKTTPWNFFDHIDKEKTAEEFITSRTNFCTYLIGESVLPKSSLLYSEYTVLNEINNLQIIIDGKNICDIKLKQKIYEELFKKYKKITQKQISTFIKHEGICNKTDEVIILGIDKECTSSLKSYIELKNIFGKQVDEISTKNMLEEIIRWATIYDEGEGKTILKTKIKAEYGKYCSDEQIKKILNLKFSGWGRLSRKFLETVTSEMPGFSEPVNIITAMRETQNNLMELLSSEFKFTENIKKINSGFEDAEKQFSYNGLVKPLFLSPSVKKMLWQTLKLVKEISHITQAPPKKIFIEMAKGAELEPARTKTRLKILQDLYSSCKNDADAFSSEIQYLSGKIENEDNLRLRSDKLYLYYTQLGKCMYCGKPIEIGHVFDTSNYDIDHIYPQSKIKDDSISNRVLVCSSCNKNKEDKYPLKAEIQSKQRGFWNFLQRNNFISLEKLNRLTRTSPISDDETAKFIARQLVETRQATKVAAKVLEKMFPETKIVYSKAETVSMFRNKFDIIKCREINDFHHAHDAYLNIVVGNVYNTKFTNNPWNFIKEKRDNPKIADTYNYYKVFDYDVKRNNITAWEKGKTIITVKDMLKRNTPIYTRQAACKKGELFNQTIMKKGLGQHPLKKEGPLSNISKYGGYNKVSAAYYTLIEYEEKGSKIRSLETIPLYLVKDIQKNKDGLKSYLTDQIGKKEIKILIPKIKINSLLKINGFPCHITGKMGEAFVLRPAVQFCCSNDEALYFKKIIRFNEIRKQREKMGKTISPYEDLSFRSYIKDNLCKKTKADEIEEKEFYDLLQKKNLEIYDMLLTKHKDTIYKKRPNSATIDILVKGKEKFKSLIIENQFEVILEILKLFSATRNVSDLQHIGGSKNAGNARVGNKISSLDNCILIYQSITGIFEKRIDLLKI

SEQ ID NO: 801 - protein, 1395 aa, Treponema denticola
MKKEIKDYFLGLDVGTGSVGWAVTDTDYKLLKANRKDLWGMRCFETAETAEVRRLHRGARRRIERRKKRIKLLQELFSQEIAKIDEGFFQRMKESPLYAEDKTILQENTLFNDKDFTDKTYHKAYPTINHLIKAWIENKVKPDPRLLYLACHNIIKKRGHFLFEGDFDSENQFDTSIQALFEYLREDMEVDIDADSQKVKEILKDSSLKNSEKQSRLNKMLGLKPSDKQKKAITNLISGNKINFADLYDNPDLKDAEKNSISFSKDDFDALSDDLASILGDSFELLLKAKAVYNCSVLSKVIGDEQYLSFAKVKIYEKHKTDLTKLKNVIKKHFPKDYKKVFGYNKNEKNNNNYSGYVGVCKTKSKKLIINNSVNQEDFYKFLKTILSAKSEIKEVNDILTEIETGTFLPKQISKSNAEIPYQLRKMELEKILSNAEKHFSFLKQKDEKGLSHSEKIIMLLTFKIPYYIGPINDNHKKSFPDRCWVVKKEKSPSGKTTPWNFFDHIDKEKTAEEFITSRTNFCTYLIGESVLPKNSLLYSEYTVLNEINNLQIIIDGKNICDTKLKQKIYEELFKKYKKITQKQISTFIKHEGICNKTDEVIILGIDKECTSSLKSYIELKNIFGKQVDEISTKNMLEEIIRWATIYDEGEGKTILKTKIKAEYGKYCSDEQIKKILNLKFSGWGRLSRKFLETVTSEMPGFSEPVNIITAMRETQNNLMELLSSEFKFTENIKKINSGFEDVEKQFSYDGLVKPLFLSPSVKKMLWQTLKLVKEISHITQAPPKKIFIEMAKGAELDPVRTKTRLKILQDLYNNCKNDADAFSSEIKDLSGKIENEDNLRLRSDKLYLYYTQLGKCMYCGKPIEIGHVFDTSNYDIDHIYPQSKIKDDSISNRVLVCSSCNKNKEDKYPLKAEIQSKQRGFWNFLQRNNFISLEKFNRLTRATPISDDETAKFIARQLVETRQATKVAARVLEKMFPETKIVYSKAETVSMFRNKFDIVKCREINDFHHAHDAYLNIVVGNVYNTKFTNNLWNFIKEKRDNPKIADTYNYYKVFDYDVKRNNITAWEKGKTIITVKDMLKRNTPIYTRQAACKKGGLFDQTIMKKGLGQHPLKKEGPFSNISKYGGYNKVSAAYYTLIEYEEKGNKIRSLETIPLYLVKDIQKDQDVLKSYLTDLLGKKEFKILVPKIKINSLLKINGFPCHITGKTNDSFLLRPAVQFCCSNDEVLYFKKIIRFSEIRSQREKIGKTISPYEDLSFRSYIKENLCKKTKNDEIGEKEFYDLLQKKNLEIYDMLLTKHKDTIYKKRPNSATIDILVKGKEKFKSLIIENQFEVILEILKLFSATRNVSDLQHIGGSKYSGVAKIGNKISSLDNCILIYQSITGIFEKRIDLLKV

SEQ ID NO: 802 - protein, 357 aa, Treponema denticola
MKKEIKDYFLGLDVGTGSVGWAVTDTDYKLLKANRKDLWGMRCFETAETAEVRRLHRGARRRIERRKKRIKLLQELFSQEIAKTDEGFFQRMKESPFYAEDKTILQENALFNDRDFTDKTYHKAYPTINHLIKAWIENKVKPDPRLLYLACHNIIKKRGHFLFEGDFDSENQFDTSIQAFFEYLREDMEVDIDADSQKIKEILKDSSLKNSEKQSRLNKILGLKSSDKQKKAITNLISGNKINFADLYDNPDLKDAEKNSISFSKDDFDALSDDLASILGDSFELLLKAKAVYNCSVLSKVIGDEQYLSFAKVKIYEKHKTDLTKLKNVIKKHFPKDYKKVFGYNKNEKITTITPDM

SEQ ID NO: 803 - protein, 1395 aa, Treponema denticola
MKKEIKDYFLGLDVGTGSVGWAVTDTDYKLLKANRKDLWGMRCFETAETAEVRRLHRGARRRIERRKKRIKLLQELFSQEIAKTDEGFFQRMKESPFYAEDKTILQENALFNDRDFTDKTYHKAYPTINHLIKAWIENKVKPDPRLLYLACHNIIKKRGHFLFEGDFDSENQFDTSIQALFEYLREDMEVDIDADSQKVKEILKDSSLKNSEKQSRLNKMLGLKPSDKQKKAITNLISGNKINFADLYDNPDLKDAEKNSISFSKDDFDALSDDLASILGDSFELLLKAKAVYNCSVLSKVIGDEQYLSFAKVKIYEKHKTDLTKLKNVIKKHFPNDYKKVFGYNKNEKNNNNYSAYVGVCKTKSKKLVINNTVNQEDFYKFLKPILLAKSEIKEVNDILTEIETGTFLPKQISKSNAEIPYQLRKMELEKILSNAEKHFSFLKQKDEKGLSHSEKIIMLLTFKIPYYIGPINDNHKKSFPDRCWVIKKEKSPSGKTTPWNFFDHIDKDKTAEAFITSRTNFCTYLVGESVLPKNSLLYSEYTVLNEINNLQIIIDGKNICDIKLKQKIYEELFKKYKKITQKQISTFIKHEGICNKTDEVIILGIDKECTSSLKSYIELKNIFGKQVDEISTKNMLEEIIRWATIYDEGEGKTILKTKIKAEYGKYCSDEQIKKILNLKFSGWGRLSRKFLETVTSEMPGFSEPVNIITAMRETQNNLMELLSSEFKFTENIKKINSGFEDVEKQFSYDSLVKPLFLSPSVKKMLWQTLKLVKEISHITQAPPKKIFIEMAKGAELDPVRTKTRLKILQDLYNNCKNDADAFSSEIKDLSGKIENEDNLRLRSDKLYLYYTQLGKCMYCGKPIEIGHVFDTSNYDIDHIYPQSKIKDDSISNRVLVCSSCNKNKEDKYPLKAEIQSKQRGFWNFLQRNNFISLEKLNRLTRTSPISDDETAKFIARQLVETRQATKVAAKVLEKMFPETKIVYSKAETVSMFRNKFDIIKCREINDFHHAHDAYLNIVVGNVYNTKFTNNPWNFIKEKRDNPKIADTYNYYKVFDYDVKRNNITAWEKGKTIITVKDMLKRNTPIYTRQAACKKGELFNQTIMKKGLGQHPLKKEGPLSNISKYGGYNKVSAAYYTLIEYEEKGSKIRSLETIPLYLVKDIQKNKDGLKSYLTDQIGKKEIKILIPKIKINSLLKINGFPCHITGKMGEAFVLRPAVQFCCSNDEALYFKKIIRFNEIRKQREKMGKTISPYEDLSFRSYIKDNLCKKTKADEIEEKEFYDLLQKKNLEIYDMLLTKHKDTIYKKRPNSATIDILVKGKEKFKSLIIENQFEVILEILKLFSATRNVSDLQHIGGSKNAGNARVGNKISSLDNCILIYQSITGIFEKRIDLLKI

SEQ ID NO: 804 - protein, 631 aa, Treponema denticola
MLWQTLKLVKEISHITQAPPKKIFIEMAKGAELEPARTKTRLKILQDLYNNCKNDADAFSSEIKDLSGKIENEDNLRLRSDKLYLYYTQLGKCMYCGKPIEIGHVFDTSNYDIDHIYPQSKIKDDSISNRVLVCSSCNKNKEDKYPLRSEIQSKQRGFWNFLQRNNFISLEKLNRLTRTTPISDDETAKFIARQLVETRQATKVAAKVLEKMFPETKIVYSKAETVSMFRNKFDIVKCREINDFHHAHDAYLNIVVGNIYNTKFTNNPWNFIKEKRDNPKIADTYNYYKVFDYDVKRNNITAWEKGKTIITVKDMLKRNTPIYTRQAACKKGGLFDQTIMKKGLGQHPLKKEGPFSNISKYGGYNKVSAAYYTLIEYEEKENKIRSLETIPLYLVKDIQKSQEKLKSYLTDLLGKKEIKILVPKIKINSLLKINGFPCHITGKTNDSFLLRPAVQFCCSNDEVLYFKKIIRFNEIRSQREKMGKTISPYEDLSFRSYIKENLCKKTKNDEIGEKEFYDLLQKKNLEIYDMLLTKHKDTIYNKRPNSTTLGMLTKGRYEFINLKPKDQIIVMLEILKLFCTTREAIDLGLIKGKPAAGVATLGKKISNLDNCILIYQSITGIFEKRIDLLKV

SEQ ID NO: 805 - protein, 631 aa, Treponema denticola
MLWQTLKLVKEISHITQAPPKKIFIEMAKGAELEPARTKTRLKILQDLYSSCKNDADAFSSEIQYLSGKIENEDNLRLRSDKLYLYYTQLGKCMYCGKPIEIGHVFDTSNYDIDHIYPQSKIKDDSISNRVLVCSSCNKNKEDKYPLKSEIQSKQRGFWNFLQRNNFISLEKLNRLTRTTPISDDETAKFIARQLVETRQATKVAAKVLEKMFPETKIVYSKAETVSMFRNKFDIIKCREINDFHHAHDAYLNIVVGNVYNTKFTNNPWNFIKEKRDNPKIADTYNYYKVFDYDVKRNNITAWEKGKTIITVKDMLKRNTPIYTRQAACKKGELFNQTIMKKGLGQHPLKKEGPFSNISKYGGYNKVSAAYYTLIEYEEKVNKIRSLETIPLYLVKDIQKDQDVLKSYLTDLLGKKEIKILVPKIKINSLLKINGFPCHITGKTGDSFVLRPAVQFCCSNDEVLYFKKIIRFNEIRSQREKMGKTISPYEDLSFRSYIKENLCKKTKADEIGEKEFYDLLQKKNLEIYDMLLTKHKDTIYNKRPNSTTLGMLTKGRYEFINLKPKDQIIVMLEILKLFCTTREAIDLGLIKGKPAAGVATLGKKISNLDNCILIYQSITGIFEKRIDLLKV

SEQ ID NO: 806 - protein, 370 aa, Treponema denticola
MTEIETGTFLPKQISKSNAEIPYQLRKMELEKILSNAEKHFSFLKQKDEKGLSHSEKIIMLLTFKIPYYIGPINDNHKKSFPDRCWVVKKEKSPSGKTTPWNFFDHIDKEKTAEEFITSRTNFCTYLVGESVLPKSSLLYSEYTVLNEINNLQIIIDGKNICDIKLKQKIYEELFKKYKKITQKQISTFIKHEGICNKTDEVIILGIDKECTSSLKSYIELKNIFGKQVDEISTKNMLEDIIRWAAIYDEGEGKTILKTKIKAEYGKYCSDEQIKKILNLKFSGWGRLSRKFLETVTSEMPGFSEPVNIITAMRETQNNLMELLSSEFKFTENIKKINSGFEDVEKQFSYDGLVKPLFLSPSVKKCCGRL

SEQ ID NO: 807 - protein, 591 aa, Treponema phagedenis
MARGKEAEKGRTSSRYASIKALYENCKQDLADYDAVLEQFKSEEPLRLRSDKLYLYYTQLGRCMYTGRVIDIDRLMSDNSAYDIDHIYPRSKIKDDSLTNRVLVVKDANQDKRDEPLSPQIQDKQKGFWDFLKHNNFISIEKYERLTYRGYFTEEMLSGFIARQLVETRQGTKTAGQILEQLYPDSTVVYCKAANTSEFRQKFNLIKCREINDLHHAHDAYLNIAVGNVYYTKFTSNPRNFMKLKEPYNLRELFDRDVERNNTIAWVKNKTITTIKDMLKRNTPLYTRYAYCKTGGFFDQNIMKKGKGQFPLKENSPLSDISKYGGYNKVSGAYFILVQKKEKDAVVRILETVPLYLLNKPGKESENVREYLSTALGTKDFKILIPKIKINSLFKINGFLVHITGKTNDRFLVRSAVQFFCDDNLTLFFKRIIAFNGLRNLNKDKSMTAYDDNTMRVYVRGNLFKDKNQLFDKNKFNEIVKGKNISVYKDMVKRYETSIYKFRPNTAVIPILKSGEDKFINLPIEEQFKILQEILKLFGAINGTANLTLIGGRPSTGEMKISNNISNLKQCILIHQSPTGVFEQQIDLLKI

SEQ ID NO: 808 - protein, 1062 aa, Unknown
  Treponema sp.
MIMKLEKWRLGLDLGTNSIGWSVFSLDKDNSVQDLIDMGVRIFSDGRDPKTKEPLAVARRTARSQRKLIYRRKLRRKQVFKFLQEQGLFPKTKEECMTLKSLNPYELRIKALDEKLEPYELGRALFNLAVRRGFKSNRKDGSREEVSEKKSPDEIKTQADMQTHLEKAIKENGCRTITEFLYKNQGENGGIRFAPGRMTYYPTRKMYEEEFNLIRSKQEKYYPQVDWDDIYKAIFYQRPLKPQQRGYCIYENDKERTFKAMPCSQKLRILQDIGNLAYYEGGSKKRVELNDNQDKVLYELLNSKDKVTFDQMRKALCLADSNSFNLEENRDFLIGNPTAVKMRSKNRFGKLWDEIPLEEQDLIIETIITADEDDAVYEVIKKYDLTQEQRDFIVKNTILQSGTSMLCKEVSEKLVKRLEEIADLKYHEAVESLGYKFADQTVEKYDLLPYYGKVLPGSTMEIDLSAPETNPEKHYGKISNPTVHVALNQTRVVVNALIKEYGKPSQIAIELSRDLKNNVEKKAEIARKQNQRAKENIAINDTISALYHTAFPGKSFYPNRNDRMKYRLWSELGLGNKCIYCGKGISGAELFTKEIEIEHILPFSRTLLDAESNLTVAHSSCNAFKAERSPFEAFGTNPSGYSWQEIIQRANQLKNTSKKNKFSPNAMDSFEKDSSFIARQLSDNQYIAKAALRYLKCLVENPSDVWTTNGSMTKLLRDKWEMDSILCRKFTEKEVALLGLKPEQIGNYKKNRFDHRHHAIDAVVIGLTDRSMVQKLATKNSHKGNRIEIPEFPILRSDLIEKVKNIVVSFKPDHGAEGKLSKETLLGKIKLHGKETFVCRENIVSLSEKNLDDIVDEKIKSKVKDYVAKHKGQKIEAVLSDFSKENGIKKVRCVNRVQTPIEITSGKISRYLSPEDYFAAVIWEIPGEKKTFKAQYIRRNEVEKNSKGLNVVKPAVLENGKPHPAAKQVCLLHKDDYLEFSDKGKMYFCRIAGYAATNNKLDIRPVYAVSYCADWINSTNETMLTGYWKPTPTQNWVSVNVLFDKQKARLVTVSPIGRVFRK

SEQ ID NO: 809 - protein, 281 aa, Treponema vincentii
MKTLGLDIGTNSIGWGIVDETANKIEDCGVYIFPEGVKKEKGNESSKAAERTSFRLARRLKFRRKLRKCETLKVLIKNKMCPLTMEELEKWRKQKIYPVSQDFLNWYRTDELKNWEPYFLRKKCAEQKAGPYEIGRALYHLAQRRGFLSNRKESTKASDGKVSKSIDELSSLMDGRTLGQYFYELKQSGEKVRGKYTSRKEHYEKEFNKICEVQEISPELKDDLYRAIFFQRKLKSQKFLVGKCTFERNKPRAPISHFEFEEFRMLSFINSIKIAKKLRRR

SEQ ID NO: 810 - protein, 675 aa, Unknown
  uncultured bacterium
MTAENYSNVRFAFDIGTNSIGWAVFQLNDKQEATSILNAGARIFSDGRDPKTFEPLAVRRRNVRSASRMRDRYLRRRKRTLDKLIGYGLLPEDKAERDKILLETNDKPSGSTDKKTDPYSLRARALEEKLPLAYVARALFHIGQRRGFKSNRKADRKSNEKGKIAAGIEELSGLMHQSHAPTLGAYLAKRREEGHVVRLRASSEALTNKAYAFYPERAMLEDEFHKIWQAQAEYYPDVLTKEREEELFHVMFFQRPLKEQKVGLCTLVEGELRLPKSDPLFQQFRLYKEINELAIILPDLSQRKLTMEERDTLITLMRPAKTKTFAALRKALKIPAGGRFNKETENRKQLTGDEVYSVFSKPELFGGDWAKFSIEQQREIIDQLNNEENPDKLEEWLKNKFPKLSDEQRSEIINANLPDGYGRFGITATSKILEQLKKDVISEAEAAHRCGFDHSLANRNWKGLDELPRYQEVLERHIVPGTGDKNDIYDIYKGRLTNPTVHIGLNQVRRLTNRLIKAYGKPWQIVVELARDLPMSSEERKEHNKTLNDNIKAGFERTQKLERLGQKDNANNRLLLKLWEELGKDPDDRKSIYSGTRITEPMLFSGEVEIDHILPFSLTYDDSYANKILCLREENRIKRNRAPADVTEWKDRYDEIIGRSKNCQRTNKNVLGPMQ

SEQ ID NO: 811 - protein, 1017 aa, Unknown
  uncultured bacterium
MRVDSLGRCLSDEEWARVIYHLCKHRGFHWISRAEAKQTEGDSKSEGGKVKQGLAGTAKLMDEKGYRSAAEMVLAEFPEAQRNKQGEYRKALSRELLAKELALLFARQRVFGNRHATDTLETAILGNSDKKSGLFWQQKPALAGADLLKMLGTCTFEKNEYRAPKASFTAERHVWLTRLNNLRIVTDGITRQLTEQERQLVLPLPYRQAGDLTYKQLGMALTKAGLLEAGCFKFIGLAYPTEAQKAEGKTKDPESATLVKIPAWQELRQTLNKASLNDEWEKLSGDALCGQPEIFDKIAWILSVYKDDDEVRTELAKLVLPNPEGLTEALLNIRFDKFHALSLKALRAIVPHMEKGLRYDEACVQAGYHHSQLHKIGEGEHKYLPPLYDGRDGDGRMIFAEDADIPRNPVVLRSLNQARKVVNAIIRRYGSPSAVHIEMARDLSRPFDERNKIKKDQDEYQARNQRDREQFIELFGHPPKGLEFEKWRLYREQNGQCAYSQKPLASSGDVAEIFLDGSTEIDHALPYSRSFDDSKNNKVLVLTRENRDKGNRTPYEYLGGAENSERWQRFFSFVESNKAYRLAKRTRLLRKDFGAKESEEFRERNLNDTRYVCRFFKNYVEQHLKLAEGSEAKRCVVVSGQLTNFLRTRWGLLKIRSDSDRHHALDAAVVAACSHSMVQRLSNYSRTRELEQVRDGFVNIETGEIVNPAMHQQLREHFPDPWPYFRHELEARLKIDSPALLREEMARLSSYTEEELAALKPLFVSRAPQRRNGGAAHKDTIYGQPEKLKKNGSVSQKVALASLALKDIDLLADPHRNAKLYGAIRERLEAHGGKGDKAFPATNPLRKPDKEGNPTGPIVRTVTKVIDKLSGIPVRGGIAKNDTMLRVDVFTKAGRFHLVPVYVHHRVTGLPNQAITRGKDENQWAIIDDTFEWRFSLYPNDLVQIRLKDETHLGYYASTDRSTSSISIWAHDRNQSVGKDGLIRSIGVTTAKDIEKFHVDTLGNVYPAPPEKRRGLA

SEQ ID NO: 812 - protein, 600 aa, Unknown
  uncultured bacterium
VNAIIKKHGSLSAVHIEMARDLSRPLDERREVKKLQEEFKDRNDKARESFEADHGYRPKGIVFEKWMLYREQHGKCAYSMEGLDIDRVLNDANYAQIDHALPYSRSYDDSKNNKVLVLTRENQNKGNRTAYEYLTSFAGGEDGDRWRNYAAWVNSNKSYRMAKRNRLLRKNYGPDEASGFKDRNLNDTRYICKFFKNYVEEHLQLAPRADGNANKRCVVVNGQLTAFLRARWGLSKVRSESDRHHALDAAVVAACSHGMVKALADYARNKEVAYLREGFPDPETGEIINPEAHARGVHHFPEPWAHFRHELQVRLYSDDLQALREDLQRLGTYSEQDLLGVRTLFVSRAPQRRNDGAVHKETIYAQPEALRKQGGVVQKVPLTSLSLKDLDNLADPHRNAKLYTALRARLEAHGGKADKAFGPDQPFYKPDKNGNPTGPIVRTIKLVIDKLSGIPIRGGVAKNDTMLRVDVFTKAGKFHLVPVYVHHRVTGLPDRAIVAFKDEVEWTQVDDSFKFLFSIHPNDLIRIGLKAKEPMIGYFASCHRGTGAFNVWSHDRNTSVGKSGSVEGIGIKTALSLEKLNIDVLGNVYPARPEQRHGLA

SEQ ID NO: 813 - protein, 1011 aa, Unknown
  uncultured delta
MSSKAIDSLEQLDLFKPQEYTLGLDLGIKSIGWAILSGERIANAGVYLFETAEELNSTGNKLISKAAERGRKRRIRRMLDRKARRGRHIRYLLEREGLPTDELEEVVVHQSNRTLWDVRAEAVERKLTKQELAAVLFHLVRHRGYFPNTKKLPPDDESDSADEEQGKINRATSRLREELKASDCKTIGQFLAQNRDRQRNREGDYSNLMARKLVFEEALQILAFQRKQGHELSKDFEKTYLDVLMGQRSGRSPKLGNCSLIPSELRAPSSAPSTEWFKFLQNLGNLQISNAYREEWSIDAPRRAQIIDACSQRSTSSYWQIRRDFQIPDEYRFNLVNYERRDPDVDLQEYLQQQERKTLANFRNWKQLEKIIGTGHPIQTLDEAARLITLIKDDEKLSDQLADLLPEASDKAITQLCELDFTTAAKISLEAMYRILPHMNQGMGFFDACQQESLPEIGVPPAGDRVPPFDEMYNPVVNRVLSQSRKLINAVIDEYGMPAKIRVELARDLGKGRELRERIKLDQLDKSKQNDQRAEDFRAEFQQAPRGDQSLRYRLWKEQNCTCPYSGRMIPVNSVLSEDTQIDHILPISQSFDNSLSNKVLCFTEENAQKSNRTPFEYLDAADFQRLEAISGNWPEAKRNKLLHKSFGKVAEEWKSRALNDTRYLTSALADHLRHHLPDSKIQTVNGRITGYLRKQWGLEKDRDKHTHHAVDAIVVACTTPAIVQQVTLYHQDIRRYKKLGEKRPTPWPETFRQDVLDVEEEIFITRQPKKVSGGIQTKDTLRKHRSKPDRQRVALTKVKLADLERLVEKDASNRNLYEHLKQCLEESGDQPTKAFKAPFYMPSGPEAKQRPILSKVTLLREKPEPPKQLTELSGGRRYDSMAQGRLDIYRYKPGGKRKDEYRVVLQRMIDLMRGEENVHVFQKGVPYDQGPEIEQNYTFLFSLYFDDLVEFQRSADSEVIRGYYRTFNIANGQLKISTYLEGRQDFDFFGANRLAHFAKVQVNLLGKVIK

SEQ ID NO: 814 - protein, 1011 aa, Unknown; identical to SEQ ID NO: 813
  uncultured delta proteobacterium HF0070_07E19

SEQ ID NO: 815 - protein, 1120 aa, Unknown
  Veillonella sp.
MGFKANLVNLFTDEDIEVILPEEKEFKSINLHEGIYEDVRDAYEDAWGDRFAIVDQCKVLHDIIVISSIIKPGQSLSEAKIESYNQHKEDLVLLKSVLKEDRKLYDDMFVVDTDKGTNYVKYTKQGVNGNTSATQEEFYKYVRKVVSVLPETEHTRRIVQKLEEGTFLPLQRISKNGVVPYQLHKEELVRILDKATVNFPFLNKVENGLTVADKIISILEFKIPYYVGPLNPTHSIENGGFAWVVRKEAGQVLPWNFEQKVDVQASAVKFIENLTNKCTYLIDQDVLPKYSLLYAEFSLLNELNNIRVNDKPLPADVKQAFIRDHFISLQDSKTATKKVVAKYLVDNNYVSQPPIITGMDQQIATKLTSHRDMTRILGEHFDHAMAEDIIRYITIFGESKDMLRQVLKNYYGDRLTTEQIKKLGKLTYTGWGRLSKKFLSDIWGMKKNDDDAEAGTIIEHMREGQENLMQLLSSSYSFIDVVQEYVTNVLGEKEKTAFEMLEDLSLSPMVKRSVWQTLRILDEIVSIRKELPKKIFVEVARTNKADKKRTQSRKALLEELYKQIKDEDVHVLQQELESKEDSALNSKKLYLYFTQMGRCMYSGRRIDIHELFTDKYDIDHIYPRSLTKDDSWHNIVLVEKQLNAEKTDRFPILSAIQSKQKGFWKLLWDRGFISEKKYDRLVRTTDLTDEELNQFINRQMVSTNQSVKAVTTLLHQLYPETEVVFSKAENVSDFRHDYDFVKVRSINHHHHAKDAYLNIVVGNVYHEKFTKNFLSFAKQKGTRRTYNLTKIFEYEIKLTEESKKVIWDPNIHMDIVKKMMKSNDVRVTQRAVPQKGGLSDETIYKKGIAKRGVYLPLKSSDERVRDVEKYGGRTSITISEYIILNIRDTSDQDRIEIFSLPLYIAGKKDIHKAIEEAYLSTCKKPASVVDIQILYRGLYIGSKVNINGFTYYMGGKTGSNVSIDSAVDVVMDITSSVYIKLLEKVAIKKIENPKTFRIENIKTSYNHKEVTVSKEQNIALYQELLKKLDTPLFSKMKGNKLEEFRTVGFDTFIALSLEEQASVLLEVLNVLTNFKTKRDITKIGMTSSRSTLGINISNTEQFSVITTSITGLYEQEIKIK

SEQ ID NO: 816 - protein, 983 aa, Verminephrobacter aporrectodeae
MRRRRDRLLKRKARMHDQLMRHGFFPADAAGRKVLERLNPYQLRAKGLHQALTPGEFARALFHINQRRGFQSNRKTDRKDNESGALKQAISELRAQIHDSGCATVGEWFWKERMQQKPEGVHRQGVRARYRETPYTTDEGRQRIDKRYDLYVDRAMIEQEFDALWAVQAALQPGLFTDAACKELRYTLLFQRKLRPVKPGRCTLLPEEERAPLALPSTQRFRILQEVNHLRLLDEALREVPLTLAQRDALVAALESQGKLGFAPMRKLLKLPGTVKFNLEDEKRTELKGNATSAILARKDLFGPAWAGFDAALQDEIVWQLVSEEGEGRLIAWLQQHTGVDEARAEAIADTSLPEGYGSLSRKALERIVPALQREVCSYDKAVQAAGFAHHSDLGFDFEHSGDEVQQVGERIIASTGEVRPLFAFKQLPYYGKALQRHVAFGSGKPEDPEEKRHGKIANPTVHIGLNQVRTVVNALIRRYGRPSEVVVELARDLKQSREQQQETQRKQAENQRRNTRIRERIAETLGISPERVRSSDIQKWILWEELSFDVVDRRCPYSGEQISTTMLLSPKVEIEHILPFSQTLDDSLNNRTVALREANRIKRNRTPWDARADFEARGWSYEGILHRAERMPLRKRYRFAPDGYQRWLGEDKDFLARALNDTRYLSRVAANYLRLVCPKPQGVRVIPGRMTAMLRAKFGLNDVLGLDGEKNRNDHRHHAVDACVIGVTDQGLMQRFARASAQAREDGLTRLVQDMPLPWPSYRDHVERAVRHIWVSHKPDHGFEGAMMEETAYGIRKDGSIKPRRKADGSAGREVVNLIRITESRQPVRHGVDSQGQPLPYKGYVGGSNYCIEITANDQGKWEGAVISTFEAYRIVRASGWGRLRHCSHGQNGRPLMMRLMIGDAVRLALDGSEKTMRVVKISANGQVFLVAPNEANVDARNRDKADPFAYVSKKAGSFQSAKARQVSISPIGELRDPGFKG

SEQ ID NO: 817 - protein, 20 aa, Artificial sequence
  Synthetic sequence
GLFHALLHLLHSLWHLLLHA

SEQ ID NO: 818 - protein, 33 aa, Artificial sequence
  Synthetic sequence
GLFEAIAEFIENGWEGLIEGWYGGRKKRRQRRR

SEQ ID NO: 819 - protein, 27 aa, Artificial sequence
  Synthetic sequence
GPSQPTYPGDDAPVRDLIRFYRDLRRY

SEQ ID NO: 820 - protein, 28 aa, Artificial sequence
  Synthetic sequence
WYSCNVCGKAFVLSRHLNRHLRVHRRAT

SEQ ID NO: 821 - protein, 27 aa, Artificial sequence
  Synthetic sequence
HHEHHEHHEHHEHHEHHEHHEHHEHHE

SEQ ID NO: 822 - protein, 98 aa, Pan troglodytes
MAVPETRPNHTIYINNLNEKIKKDELKKSLYAIFSQFGQILDILVSRSLKMRGQAFVIFKEVSSATNALRSMQGFPFYDKPMRIQYAKTDSDIIAKMK

SEQ ID NO: 823 - protein, 98 aa, Artificial sequence
  Synthetic sequence
MAVPETRPNHTIYINNLNEKIKKDELKKSLHAIFSRFGQILDILVSRSLKMRGQAFVIFKEVSSATNALRCMQGFPFYDKPMRIQYAKTDSDIIAKMK

SEQ ID NO: 824 - protein, 98 aa, Artificial sequence
  Synthetic sequence
MAVPETRPNHTIYINNLNEKIKKDELKKSLHAIFCRFGQILDILVSRSLKMRGQAFVIFKEVSSATNALRCMQGFPFYDKPMRIQYAKTDSDIIAKMK

SEQ ID NO: 825 - protein, 98 aa, Artificial sequence
  Synthetic sequence
MAVPETRPNHTIYINNLNEKIKKDELKKSLHAIFCRFGQILDILVSRSLKMRGQAFVIFKEVCSATNALRCMQGFPFYDKPMRIQYAKTDSDIIAKMK

SEQ ID NO: 826 - protein, 10 aa, Artificial sequence
  Synthetic sequence
CHKKKKKKHC

SEQ ID NO: 827 - protein, 8 aa, Artificial sequence
  Synthetic sequence
HHHHHWYG

SEQ ID NO: 828 - protein, 23 aa, Artificial sequence
  Synthetic sequence
GLFHAIAHFIHGGWHGLIHGWYG

SEQ ID NO: 829 - RNA, 19 nt, Artificial sequence
  Synthetic sequence
aauuucuacuguuguagau

SEQ ID NO: 830 - RNA, 19 nt, Artificial sequence
  Synthetic sequence
aauuucugcuguugcagau

SEQ ID NO: 831 - RNA, 19 nt, Artificial sequence
  Synthetic sequence
aauuuccacuguuguggau

SEQ ID NO: 832 - RNA, 19 nt, Artificial sequence
  Synthetic sequence
aauuccuacuguuguaggu

SEQ ID NO: 833 - RNA, 19 nt, Artificial sequence
  Synthetic sequence
aauuucuacuauuguagau

SEQ ID NO: 834 - RNA, 19 nt, Artificial sequence
  Synthetic sequence
aauuucuacugcuguagau

SEQ ID NO: 835 - RNA, 18 nt, Artificial sequence
  Synthetic sequence
aauuucuacuuuguagau

SEQ ID NO: 836 - RNA, 17 nt, Artificial sequence
  Synthetic sequence
aauuucuacuuguagau

SEQ ID NO: 837 - RNA, 67 nt, Artificial sequence
  Synthetic sequence
gaauuuuucaacgggugugccaauggccacuuuccagguggcaaagcccguugagcuucucaaaaag

SEQ ID NO: 838 - RNA, 79 nt, Artificial sequence
  Synthetic sequence
gucuagaggacagaauuuuucaacgggugugccaauggccacuuuccagguggcaaagcccguugagcuucucaaaaag

SEQ ID NO: 839 - RNA, 78 nt, Artificial sequence
  Synthetic sequence
ucuagaggacagaauuuuucaacgggugugccaauggccacuuuccagguggcaaagcccguugagcuucucaaaaag

SEQ ID NO: 840 - RNA, 36 nt, Artificial sequence
  Synthetic sequence
acuuuccaggcaaagcccguugagcuucucaaaaag

SEQ ID NO: 841 - RNA, 9 nt, Artificial sequence
  Synthetic sequence
agcuucuca

SEQ ID NO: 842 - RNA, 8 nt, Artificial sequence
  Synthetic sequence
gcuucuca

SEQ ID NO: 843 - RNA, 34 nt, Artificial sequence
  Synthetic sequence
  Misc_feature (15)..(34): any nucleotide
cugagaaguggcacnnnnnnnnnnnnnnnnnnnn

SEQ ID NO: 844 - RNA, 14 nt, Artificial sequence
  Synthetic sequence
cugagaaguggcac

SEQ ID NO: 845 - RNA, 9 nt, Artificial sequence
  Synthetic sequence
cugagaagu

SEQ ID NO: 846 - RNA, 13 nt, Artificial sequence
  Synthetic sequence
ugagaaguggcac

SEQ ID NO: 847 - RNA, 8 nt, Artificial sequence
  Synthetic sequence
ugagaagu

SEQ ID NO: 848 - protein, 98 aa, Artificial sequence
  Synthetic sequence
MAVPETRPNHTIYINNLNEKIKKDELKKSLHAIFSRFGQILDILVSRSLKMRGQAFVIFKEVSSATNALRSMQGFPFYDKPMRIQYAKTDSDIIAKMK

SEQ ID NO: 849 - protein, 130 aa, Artificial sequence
  Synthetic sequence
MASNFTQFVLVDNGGTGDVTVAPSNFANGVAEWISSNSRSQAYKVTCSVRQSSAQNRKYTIKVEVPKVATQTVGGVELPVAAWRSYLNMELTIPIFATNSDCELIVKAMQGLLKDGNPIPSAIAANSGIY

SEQ ID NO: 850 - protein, 127 aa, Artificial sequence
  Synthetic sequence
SKTIVLSVGEATRTLTEIQSTADRQIFEEKVGPLVGRLRLTASLRQNGAKTAYRVNLKLDQADVVDCSTSVCGELPKVRYTQVWSHDVTIVANSTEASRKSLYDLTKSLVVQATSEDLVVNLVPLGR

SEQ ID NO: 851 - protein, 26 aa, Artificial sequence
  Synthetic sequence
LHHLLHHLLHHLHHLLHHLHHLLHHL

SEQ ID NO: 852 - RNA, 7 nt, Artificial sequence
  Synthetic sequence
auugcac

SEQ ID NO: 853 - protein, 17 aa, Artificial sequence
  Synthetic sequence
CCGGAGCAGACCCCAGG

SEQ ID NO: 854 - RNA, 23 nt, Artificial sequence
  Synthetic sequence
aaacaugaggauuacccaugucg

SEQ ID NO: 855 - RNA, 23 nt, Artificial sequence
  Synthetic sequence
aaacaugaggaucacccaugucg

SEQ ID NO: 856 - RNA, 4 nt, Artificial sequence
  Synthetic sequence
auua

SEQ ID NO: 857 - RNA, 4 nt, Artificial sequence
  Synthetic sequence
auca

SEQ ID NO: 858 - RNA, 28 nt, Artificial sequence
  Synthetic sequence
ggcacagaagaagauauggcuucgugcc

SEQ ID NO: 859 - protein, 19 aa, Artificial sequence
  Synthetic sequence
NAKTRRHERRRKLAIERDT

SEQ ID NO: 860 - RNA, 6 nt, Artificial sequence
  Synthetic sequence
aaaaaa

SEQ ID NO: 861 - RNA, 15 nt, Artificial sequence
  Synthetic sequence
gcccugaaaaagggc

SEQ ID NO: 862 - RNA, 17 nt, Artificial sequence
  Synthetic sequence
acugccguauaggcagc

SEQ ID NO: 863 - RNA, 9 nt, Artificial sequence
  Synthetic sequence
uuuuauuuu

SEQ ID NO: 864 - RNA, 10 nt, Artificial sequence
  Synthetic sequence
uauuuauuua

SEQ ID NO: 865 - RNA, 20 nt, Artificial sequence
  Synthetic sequence
gaggaccuagaucaccccuc

SEQ ID NO: 866 - RNA, 11 nt, Artificial sequence
  Synthetic sequence
gaacucaauag

SEQ ID NO: 867 - RNA, 12 nt, Artificial sequence
  Synthetic sequence
gcgaggcuaagu

SEQ ID NO: 868 - RNA, 16 nt, Artificial sequence
  Synthetic sequence
acagcacaagcccgcu

SEQ ID NO: 869 - RNA, 14 nt, Artificial sequence
  Synthetic sequence
agcagggaacucgc

SEQ ID NO: 870 - RNA, 101 nt, Artificial sequence
  Synthetic sequence
guuuaagagcuauggaucauugcacuccgauccauagcaaguuuaaauaaggcuaguccguuaucaacuugaaaaaguggcaccgagucggugcuuuuuuu

SEQ ID NO: 871 - RNA, 113 nt, Artificial sequence
  Synthetic sequence
guuuaagagcuaugcuggaaacagcauagcaaguuuaaauaaggcuaguccguuaucaacuugcaauccauugcacuccggauugcaaguggcaccgagucggugcuuuuuuu

SEQ ID NO: 872 - RNA, 123 nt, Artificial sequence
  Synthetic sequence
guuuaagagcuaugcuggaaacagcauagcaaguuuaaauaaggcuaguccguuaucaacuugaaaaaguggcaccgagucggugcaucaucgcgcugcauugcacuccgcagcgcuuuuuuu

SEQ ID NO: 873 - RNA, 155 nt, Artificial sequence
  Synthetic sequence
guuuaagagcuaugcgaggcuaagucgcauugcacuccgcgacagcacaagcccgcugccauugcacuccggcagcagggaacucgcauagcaaguuuaaauaaggcuaguccguuaucaacuugaaaaaguggcaccgagucggugcuuuuuuu

SEQ ID NO: 874 - RNA, 163 nt, Artificial sequence
  Synthetic sequence
guuuaagagcuaugcuggaaacagcauagcaaguuuaaauaaggcuaguccguuaucaacuugcgaggcuaagucgcauugcacuccgcgacagcacaagcccgcugccauugcacuccggcagcagggaacucgcaaguggcaccgagucggugcuuuuuuu

SEQ ID NO: 875 - protein, 1368 aa, Streptococcus pyogenes [sequence omitted]

SEQ ID NO: 876 - protein, 1368 aa, Artificial sequence
  Synthetic sequence
MDKKYSIGLAIGTNSVGWAVITDEYKVPSKKFKVLGNTDRHSIKKNLIGALLFDSGETAEATRLKRTARRRYTRRKNRICYLQEIFSNEMAKVDDSFFHRLEESFLVEEDKKHERHPIFGNIVDEVAYHEKYPTIYHLRKKLVDSTDKADLRLIYLALAHMIKFRGHFLIEGDLNPDNSDVDKLFIQLVQTYNQLFEENPINASGVDAKAILSARLSKSRRLENLIAQLPGEKKNGLFGNLIALSLGLTPNFKSNFDLAEDAKLQLSKDTYDDDLDNLLAQIGDQYADLFLAAKNLSDAILLSDILRVNTEITKAPLSASMIKRYDEHHQDLTLLKALVRQQLPEKYKEIFFDQSKNGYAGYIDGGASQEEFYKFIKPILEKMDGTEELLVKLNREDLLRKQRTFDNGSIPHQIHLGELHAILRRQEDFYPFLKDNREKIEKILTFRIPYYVGPLARGNSRFAWMTRKSEETITPWNFEEVVDKGASAQSFIERMTNFDKNLPNEKVLPKHSLLYEYFTVYNELTKVKYVTEGMRKPAFLSGEQKKAIVDLLFKTNRKVTVKQLKEDYFKKIECFDSVEISGVEDRFNASLGTYHDLLKIIKDKDFLDNEENEDILEDIVLTLTLFEDREMIEERLKTYAHLFDDKVMKQLKRRRYTGWGRLSRKLINGIRDKQSGKTILDFLKSDGFANRNFMQLIHDDSLTFKEDIQKAQVSGQGDSLHEHIANLAGSPAIKKGILQTVKVVDELVKVMGRHKPENIVIEMARENQTTQKGQKNSRERMKRIEEGIKELGSQILKEHPVENTQLQNEKLYLYYLQNGRDMYVDQELDINRLSDYDVDHIVPQSFLKDDSIDNKVLTRSDKNRGKSDNVPSEEVVKKMKNYWRQLLNAKLITQRKFDNLTKAERGGLSELDKAGFIKRQLVETRQITKHVAQILDSRMNTKYDENDKLIREVKVITLKSKLVSDFRKDFQFYKVREINNYHHAHDAYLNAVVGTALIKKYPKLESEFVYGDYKVYDVRKMIAKSEQEIGKATAKYFFYSNIMNFFKTEITLANGEIRKRPLIETNGETGEIVWDKGRDFATVRKVLSMPQVNIVKKTEVQTGGFSKESILPKRNSDKLIARKKDWDPKKYGGFDSPTVAYSVLVVAKVEKGKSKKLKSVKELLGITIMERSSFEKNPIDFLEAKGYKEVKKDLIIKLPKYSLFELENGRKRMLASAGELQKGNELALPSKYVNFLYLASHYEKLKGSPEDNEQKQLFVEQHKHYLDEIIEQISEFSKRVILADANLDKVLSAYNKHRDKPIREQAENIIHLFTLTNLGAPAAFKYFDTTIDRKRYTSTKEVLDATLIHQSITGLYETRIDLSQLGGD

SEQ ID NO: 877 - protein, 1368 aa, Artificial sequence
  Synthetic sequence
MDKKYSIGLDIGTNSVGWAVITDEYKVPSKKFKVLGNTDRHSIKKNLIGALLFDSGETAEATRLKRTARRRYTRRKNRICYLQEIFSNEMAKVDDSFFHRLEESFLVEEDKKHERHPIFGNIVDEVAYHEKYPTIYHLRKKLVDSTDKADLRLIYLALAHMIKFRGHFLIEGDLNPDNSDVDKLFIQLVQTYNQLFEENPINASGVDAKAILSARLSKSRRLENLIAQLPGEKKNGLFGNLIALSLGLTPNFKSNFDLAEDAKLQLSKDTYDDDLDNLLAQIGDQYADLFLAAKNLSDAILLSDILRVNTEITKAPLSASMIKRYDEHHQDLTLLKALVRQQLPEKYKEIFFDQSKNGYAGYIDGGASQEEFYKFIKPILEKMDGTEELLVKLNREDLLRKQRTFDNGSIPHQIHLGELHAILRRQEDFYPFLKDNREKIEKILTFRIPYYVGPLARGNSRFAWMTRKSEETITPWNFEEVVDKGASAQSFIERMTNFDKNLPNEKVLPKHSLLYEYFTVYNELTKVKYVTEGMRKPAFLSGEQKKAIVDLLFKTNRKVTVKQLKEDYFKKIECFDSVEISGVEDRFNASLGTYHDLLKIIKDKDFLDNEENEDILEDIVLTLTLFEDREMIEERLKTYAHLFDDKVMKQLKRRRYTGWGRLSRKLINGIRDKQSGKTILDFLKSDGFANRNFMQLIHDDSLTFKEDIQKAQVSGQGDSLHEHIANLAGSPAIKKGILQTVKVVDELVKVMGRHKPENIVIEMARENQTTQKGQKNSRERMKRIEEGIKELGSQILKEHPVENTQLQNEKLYLYYLQNGRDMYVDQELDINRLSDYDVDAIVPQSFLKDDSIDNKVLTRSDKNRGKSDNVPSEEVVKKMKNYWRQLLNAKLITQRKFDNLTKAERGGLSELDKAGFIKRQLVETRQITKHVAQILDSRMNTKYDENDKLIREVKVITLKSKLVSDFRKDFQFYKVREINNYHHAHDAYLNAVVGTALIKKYPKLESEFVYGDYKVYDVRKMIAKSEQEIGKATAKYFFYSNIMNFFKTEITLANGEIRKRPLIETNGETGEIVWDKGRDFATVRKVLSMPQVNIVKKTEVQTGGFSKESILPKRNSDKLIARKKDWDPKKYGGFDSPTVAYSVLVVAKVEKGKSKKLKSVKELLGITIMERSSFEKNPIDFLEAKGYKEVKKDLIIKLPKYSLFELENGRKRMLASAGELQKGNELALPSKYVNFLYLASHYEKLKGSPEDNEQKQLFVEQHKHYLDEIIEQISEFSKRVILADANLDKVLSAYNKHRDKPIREQAENIIHLFTLTNLGAPAAFKYFDTTIDRKRYTSTKEVLDATLIHQSITGLYETRIDLSQLGGD

SEQ ID NO: 878 - protein, 1368 aa, Artificial sequence
  Synthetic sequence
MDKKYSIGLAIGTNSVGWAVITDEYKVPSKKFKVLGNTDRHSIKKNLIGALLFDSGETAEATRLKRTARRRYTRRKNRICYLQEIFSNEMAKVDDSFFHRLEESFLVEEDKKHERHPIFGNIVDEVAYHEKYPTIYHLRKKLVDSTDKADLRLIYLALAHMIKFRGHFLIEGDLNPDNSDVDKLFIQLVQTYNQLFEENPINASGVDAKAILSARLSKSRRLENLIAQLPGEKKNGLFGNLIALSLGLTPNFKSNFDLAEDAKLQLSKDTYDDDLDNLLAQIGDQYADLFLAAKNLSDAILLSDILRVNTEITKAPLSASMIKRYDEHHQDLTLLKALVRQQLPEKYKEIFFDQSKNGYAGYIDGGASQEEFYKFIKPILEKMDGTEELLVKLNREDLLRKQRTFDNGSIPHQIHLGELHAILRRQEDFYPFLKDNREKIEKILTFRIPYYVGPLARGNSRFAWMTRKSEETITPWNFEEVVDKGASAQSFIERMTNFDKNLPNEKVLPKHSLLYEYFTVYNELTKVKYVTEGMRKPAFLSGEQKKAIVDLLFKTNRKVTVKQLKEDYFKKIECFDSVEISGVEDRFNASLGTYHDLLKIIKDKDFLDNEENEDILEDIVLTLTLFEDREMIEERLKTYAHLFDDKVMKQLKRRRYTGWGRLSRKLINGIRDKQSGKTILDFLKSDGFANRNFMQLIHDDSLTFKEDIQKAQVSGQGDSLHEHIANLAGSPAIKKGILQTVKVVDELVKVMGRHKPENIVIEMARENQTTQKGQKNSRERMKRIEEGIKELGSQILKEHPVENTQLQNEKLYLYYLQNGRDMYVDQELDINRLSDYDVDAIVPQSFLKDDSIDNKVLTRSDKNRGKSDNVPSEEVVKKMKNYWRQLLNAKLITQRKFDNLTKAERGGLSELDKAGFIKRQLVETRQITKHVAQILDSRMNTKYDENDKLIREVKVITLKSKLVSDFRKDFQFYKVREINNYHHAHDAYLNAVVGTALIKKYPKLESEFVYGDYKVYDVRKMIAKSEQEIGKATAKYFFYSNIMNFFKTEITLANGEIRKRPLIETNGETGEIVWDKGRDFATVRKVLSMPQVNIVKKTEVQTGGFSKESILPKRNSDKLIARKKDWDPKKYGGFDSPTVAYSVLVVAKVEKGKSKKLKSVKELLGITIMERSSFEKNPIDFLEAKGYKEVKKDLIIKLPKYSLFELENGRKRMLASAGELQKGNELALPSKYVNFLYLASHYEKLKGSPEDNEQKQLFVEQHKHYLDEIIEQISEFSKRVILADANLDKVLSAYNKHRDKPIREQAENIIHLFTLTNLGAPAAFKYFDTTIDRKRYTSTKEVLDATLIHQSITGLYETRIDLSQLGGD

SEQ ID NO: 879 - protein, 1368 aa, Artificial sequence
  Synthetic sequence
MDKKYSIGLAIGTNSVGWAVITDEYKVPSKKFKVLGNTDRHSIKKNLIGALLFDSGETAEATRLKRTARRRYTRRKNRICYLQEIFSNEMAKVDDSFFHRLEESFLVEEDKKHERHPIFGNIVDEVAYHEKYPTIYHLRKKLVDSTDKADLRLIYLALAHMIKFRGHFLIEGDLNPDNSDVDKLFIQLVQTYNQLFEENPINASGVDAKAILSARLSKSRRLENLIAQLPGEKKNGLFGNLIALSLGLTPNFKSNFDLAEDAKLQLSKDTYDDDLDNLLAQIGDQYADLFLAAKNLSDAILLSDILRVNTEITKAPLSASMIKRYDEHHQDLTLLKALVRQQLPEKYKEIFFDQSKNGYAGYIDGGASQEEFYKFIKPILEKMDGTEELLVKLNREDLLRKQRTFDNGSIPHQIHLGELHAILRRQEDFYPFLKDNREKIEKILTFRIPYYVGPLARGNSRFAWMTRKSEETITPWNFEEVVDKGASAQSFIERMTNFDKNLPNEKVLPKHSLLYEYFTVYNELTKVKYVTEGMRKPAFLSGEQKKAIVDLLFKTNRKVTVKQLKEDYFKKIECFDSVEISGVEDRFNASLGTYHDLLKIIKDKDFLDNEENEDILEDIVLTLTLFEDREMIEERLKTYAHLFDDKVMKQLKRRRYTGWGRLSRKLINGIRDKQSGKTILDFLKSDGFANRNFMQLIHDDSLTFKEDIQKAQVSGQGDSLHEHIANLAGSPAIKKGILQTVKVVDELVKVMGRHKPENIVIEMARENQTTQKGQKNSRERMKRIEEGIKELGSQILKEHPVENTQLQNEKLYLYYLQNGRDMYVDQELDINRLSDYDVDHIVPQSFLADDSIDNKVLTRSDKNRGKSDNVPSEEVVKKMKNYWRQLLNAKLITQRKFDNLTKAERGGLSELDKAGFIKRQLVETRQITKHVAQILDSRMNTKYDENDKLIREVKVITLKSKLVSDFRKDFQFYKVREINNYHHAHDAYLNAVVGTALIKKYPALESEFVYGDYKVYDVRKMIAKSEQEIGKATAKYFFYSNIMNFFKTEITLANGEIRKAPLIETNGETGEIVWDKGRDFATVRKVLSMPQVNIVKKTEVQTGGFSKESILPKRNSDKLIARKKDWDPKKYGGFDSPTVAYSVLVVAKVEKGKSKKLKSVKELLGITIMERSSFEKNPIDFLEAKGYKEVKKDLIIKLPKYSLFELENGRKRMLASAGELQKGNELALPSKYVNFLYLASHYEKLKGSPEDNEQKQLFVEQHKHYLDEIIEQISEFSKRVILADANLDKVLSAYNKHRDKPIREQAENIIHLFTLTNLGAPAAFKYFDTTIDRKRYTSTKEVLDATLIHQSITGLYETRIDLSQLGGD

SEQ ID NO: 880 - protein, 1367 aa, Artificial sequence
  Synthetic sequence
DKKYSIGLAIGTNSVGWAVITDEYKVPSKKFKVLGNTDRHSIKKNLIGALLFDSGETAEATRLKRTARRRYTRRKNRICYLQEIFSNEMAKVDDSFFHRLEESFLVEEDKKHERHPIFGNIVDEVAYHEKYPTIYHLRKKLVDSTDKADLRLIYLALAHMIKFRGHFLIEGDLNPDNSDVDKLFIQLVQTYNQLFEENPINASGVDAKAILSARLSKSRRLENLIAQLPGEKKNGLFGNLIALSLGLTPNFKSNFDLAEDAKLQLSKDTYDDDLDNLLAQIGDQYADLFLAAKNLSDAILLSDILRVNTEITKAPLSASMIKRYDEHHQDLTLLKALVRQQLPEKYKEIFFDQSKNGYAGYIDGGASQEEFYKFIKPILEKMDGTEELLVKLNREDLLRKQRTFDNGSIPHQIHLGELHAILRRQEDFYPFLKDNREKIEKILTFRIPYYVGPLARGNSRFAWMTRKSEETITPWNFEEVVDKGASAQSFIERMTAFDKNLPNEKVLPKHSLLYEYFTVYNELTKVKYVTEGMRKPAFLSGEQKKAIVDLLFKTNRKVTVKQLKEDYFKKIECFDSVEISGVEDRFNASLGTYHDLLKIIKDKDFLDNEENEDILEDIVLTLTLFEDREMIEERLKTYAHLFDDKVMKQLKRRRYTGWGALSRKLINGIRDKQSGKTILDFLKSDGFANRNFMALIHDDSLTFKEDIQKAQVSGQGDSLHEHIANLAGSPAIKKGILQTVKVVDELVKVMGRHKPENIVIEMARENQTTQKGQKNSRERMKRIEEGIKELGSQILKEHPVENTQLQNEKLYLYYLQNGRDMYVDQELDINRLSDYDVDHIVPQSFLKDDSIDNKVLTRSDKNRGKSDNVPSEEVVKKMKNYWRQLLNAKLITQRKFDNLTKAERGGLSELDKAGFIKRQLVETRAITKHVAQILDSRMNTKYDENDKLIREVKVITLKSKLVSDFRKDFQFYKVREINNYHHAHDAYLNAVVGTALIKKYPKLESEFVYGDYKVYDVRKMIAKSEQEIGKATAKYFFYSNIMNFFKTEITLANGEIRKRPLIETNGETGEIVWDKGRDFATVRKVLSMPQVNIVKKTEVQTGGFSKESILPKRNSDKLIARKKDWDPKKYGGFDSPTVAYSVLVVAKVEKGKSKKLKSVKELLGITIMERSSFEKNPIDFLEAKGYKEVKKDLIIKLPKYSLFELENGRKRMLASAGELQKGNELALPSKYVNFLYLASHYEKLKGSPEDNEQKQLFVEQHKHYLDEIIEQISEFSKRVILADANLDKVLSAYNKHRDKPIREQAENIIHLFTLTNLGAPAAFKYFDTTIDRKRYTSTKEVLDATLIHQSITGLYETRIDLSQLGGD

SEQ ID NO: 881 - protein, 1053 aa, Staphylococcus aureus; identical to SEQ ID NO: 249

SEQ ID NO: 882 - protein, 1300 aa, Francisella tularensis
MSIYQEFVNKYSLSKTLRFELIPQGKTLENIKARGLILDDEKRAKDYKKAKQIIDKYHQFFIEEILSSVCISEDLLQNYSDVYFKLKKSDDDNLQKDFKSAKDTIKKQISEYIKDSEKFKNLFNQNLIDAKKGQESDLILWLKQSKDNGIELFKANSDITDIDEALEIIKSFKGWTTYFKGFHENRKNVYSSNDIPTSIIYRIVDDNLPKFLENKAKYESLKDKAPEAINYEQIKKDLAEELTFDIDYKTSEVNQRVFSLDEVFEIANFNNYLNQSGITKFNTIIGGKFVNGENTKRKGINEYINLYSQQINDKTLKKYKMSVLFKQILSDTESKSFVIDKLEDDSDVVTTMQSFYEQIAAFKTVEEKSIKETLSLLFDDLKAQKLDLSKIYFKNDKSLTDLSQQVFDDYSVIGTAVLEYITQQIAPKNLDNPSKKEQELIAKKTEKAKYLSLETIKLALEEFNKHRDIDKQCRFEEILANFAAIPMIFDEIAQNKDNLAQISIKYQNQGKKDLLQASAEDDVKAIKDLLDQTNNLLHKLKIFHISQSEDKANILDKDEHFYLVFEECYFELANIVPLYNKIRNYITQKPYSDEKFKLNFENSTLANGWDKNKEPDNTAILFIKDDKYYLGVMNKKNNKIFDDKAIKENKGEGYKKIVYKLLPGANKMLPKVFFSAKSIKFYNPSEDILRIRNHSTHTKNGSPQKGYEKFEFNIEDCRKFIDFYKQSISKHPEWKDFGFRFSDTQRYNSIDEFYREVENQGYKLTFENISESYIDSVVNQGKLYLFQIYNKDFSAYSKGRPNLHTLYWKALFDERNLQDVVYKLNGEAELFYRKQSIPKKITHPAKEAIANKNKDNPKKESVFEYDLIKDKRFTEDKFFFHCPITINFKSSGANKFNDEINLLLKEKANDVHILSIDRGERHLAYYTLVDGKGNIIKQDTFNIIGNDRMKTNYHDKLAAIEKDRDSARKDWKKINNIKEMKEGYLSQVVHEIAKLVIEYNAIVVFEDLNFGFKRGRFKVEKQVYQKLEKMLIEKLNYLVFKDNEFDKTGGVLRAYQLTAPFETFKKMGKQTGIIYYVPAGFTSKICPVTGFVNQLYPKYESVSKSQEFFSKFDKICYNLDKGYFEFSFDYKNFGDKAAKGKWTIASFGSRLINFRNSDKNHNWDTREVYPTKELEKLLKDYSIEYGHGECIKAAICGESDKKFFAKLTSVLNTILQMRNSKTGTELDYLISPVADVNGNFFDSRQAPKNMPQDADANGAYHIGLKGLMLLGRIKNNQEGKKLNLVIKNEEYFEFVQNRNN

SEQ ID NO: 883 - protein, 1306 aa, Acidaminococcus sp. BV3L6
TQFEGFTNLYQVSKTLRFELIPQGKTLKHIQEQGFIEEDKARNDHYKELKPIIDRIYKTYADQCLQLVQLDWENLSAAIDSYRKEKTEETRNALIEEQATYRNAIHDYFIGRTDNLTDAINKRHAEIYKGLFKAELFNGKVLKQLGTVTTTEHENALLRSFDKFTTYFSGFYENRKNVFSAEDISTAIPHRIVQDNFPKFKENCHIFTRLITAVPSLREHFENVKKAIGIFVSTSIEEVFSFPFYNQLLTQTQIDLYNQLLGGISREAGTEKIKGLNEVLNLAIQKNDETAHIIASLPHRFIPLFKQILSDRNTLSFILEEFKSDEEVIQSFCKYKTLLRNENVLETAEALFNELNSIDLTHIFISHKKLETISSALCDHWDTLRNALYERRISELTGKITKSAKEKVQRSLKHEDINLQEIISAAGKELSEAFKQKTSEILSHAHAALDQPLPTTLKKQEEKEILKSQLDSLLGLYHLLDWFAVDESNEVDPEFSARLTGIKLEMEPSLSFYNKARNYATKKPYSVEKFKLNFQMPTLASGWDVNKEKNNGAILFVKNGLYYLGIMPKQKGRYKALSFEPTEKTSEGFDKMYYDYFPDAAKMIPKCSTQLKAVTAHFQTHTTPILLSNNFIEPLEITKEIYDLNNPEKEPKKFQTAYAKKTGDQKGYREALCKWIDFTRDFLSKYTKTTSIDLSSLRPSSQYKDLGEYYAELNPLLYHISFQRIAEKEIMDAVETGKLYLFQIYNKDFAKGHHGKPNLHTLYWTGLFSPENLAKTSIKLNGQAELFYRPKSRMKRMAHRLGEKMLNKKLKDQKTPIPDTLYQELYDYVNHRLSHDLSDEARALLPNVITKEVSHEIIKDRRFTSDKFFFHVPITLNYQAANSPSKFNQRVNAYLKEHPETPIIGIDRGERNLIYITVIDSTGKILEQRSLNTIQQFDYQKKLDNREKERVAARQAWSVVGTIKDLKQGYLSQVIHEIVDLMIHYQAVVVLENLNFGFKSKRTGIAEKAVYQQFEKMLIDKLNCLVLKDYPAEKVGGVLNPYQLTDQFTSFAKMGTQSGFLFYVPAPYTSKIDPLTGFVDPFVWKTIKNHESRKHFLEGFDFLHYDVKTGDFILHFKMNRNLSFQRGLPGFMPAWDIVFEKNETQFDAKGTPFIAGKRIVPVIENHRFTGRYRDLYPANELIALLEEKGIVFRDGSNILPKLLENDDSHAIDTMVALIRSVLQMRNSNAATGEDYINSPVRDLNGVCFDSRFQNPEWPMDADANGAYHIALKGQLLLNHLKESKDLKLQNGISNQDWLAYIQELRN

SEQ ID NO: 884 - protein, 1306 aa, Artificial sequence
  Synthetic sequence
TQFEGFTNLYQVSKTLRFELIPQGKTLKHIQEQGFIEEDKARNDHYKELKPIIDRIYKTYADQCLQLVQLDWENLSAAIDSYRKEKTEETRNALIEEQATYRNAIHDYFIGRTDNLTDAINKRHAEIYKGLFKAELFNGKVLKQLGTVTTTEHENALLRSFDKFTTYFSGFYENRKNVFSAEDISTAIPHRIVQDNFPKFKENCHIFTRLITAVPSLREHFENVKKAIGIFVSTSIEEVFSFPFYNQLLTQTQIDLYNQLLGGISREAGTEKIKGLNEVLNLAIQKNDETAHIIASLPHRFIPLFKQILSDRNTLSFILEEFKSDEEVIQSFCKYKTLLRNENVLETAEALFNELNSIDLTHIFISHKKLETISSALCDHWDTLRNALYERRISELTGKITKSAKEKVQRSLKHEDINLQEIISAAGKELSEAFKQKTSEILSHAHAALDQPLPTTLKKQEEKEILKSQLDSLLGLYHLLDWFAVDESNEVDPEFSARLTGIKLEMEPSLSFYNKARNYATKKPYSVEKFKLNFQMPTLASGWDVNKEKNNGAILFVKNGLYYLGIMPKQKGRYKALSFEPTEKTSEGFDKMYYDYFPDAAKMIPKCSTQLKAVTAHFQTHTTPILLSNNFIEPLEITKEIYDLNNPEKEPKKFQTAYAKKTGDQKGYREALCKWIDFTRDFLSKYTKTTSIDLSSLRPSSQYKDLGEYYAELNPLLYHISFQRIAEKEIMDAVETGKLYLFQIYNKDFAKGHHGKPNLHTLYWTGLFSPENLAKTSIKLNGQAELFYRPKSRMKRMAHRLGEKMLNKKLKDQKTPIPDTLYQELYDYVNHRLSHDLSDEARALLPNVITKEVSHEIIKDRRFTSDKFFFHVPITLNYQAANSPSKFNQRVNAYLKEHPETPIIGIDRGERNLIYITVIDSTGKILEQRSLNTIQQFDYQKKLDNREKERVAARQAWSVVGTIKDLKQGYLSQVIHEIVDLMIHYQAVVVLENLNFGFKSKRTGIAEKAVYQQFEKMLIDKLNCLVLKDYPAEKVGGVLNPYQLTDQFTSFAKMGTQSGFLFYVPAPYTSKIDPLTGFVDPFVWKTIKNHESRKHFLEGFDFLHYDVKTGDFILHFKMNRNLSFQRGLPGFMPAWDIVFEKNETQFDAKGTPFIAGKRIVPVIENHRFTGRYRDLYPANELIALLEEKGIVFRDGSNILPKLLENDDSHAIDTMVALIRSVLQMANSNAATGEDYINSPVRDLNGVCFDSRFQNPEWPMDADANGAYHIALKGQLLLNHLKESKDLKLQNGISNQDWLAYIQELRN

SEQ ID NO: 885 - protein, 13 aa, Artificial sequence
  Synthetic sequence
GRKKRRQRRRPPQ

SEQ ID NO: 886 - protein, 16 aa, Artificial sequence
  Synthetic sequence
RQIKIWFQNRRMKWKK

SEQ ID NO: 887 - protein, 10 aa, Artificial sequence
  Synthetic sequence
RRIPNRRPRR

SEQ ID NO: 888 - protein, 5 aa, Artificial sequence
  Synthetic sequence
RLRWR

SEQ ID NO: 889 - protein, 27 aa, Artificial sequence
  Synthetic sequence
GALFLGFLGAAGSTMGAWSQPKKKRKV

SEQ ID NO: 890 - protein, 20 aa, Artificial sequence
  Synthetic sequence
KETWWETWWTEWSQPKKRKV

SEQ ID NO: 891 - protein, 22 aa, Artificial sequence
  Synthetic sequence
MVRRFLVTLRIRRACGPPRVRV

SEQ ID NO: 892 - protein, 18 aa, Artificial sequence
  Synthetic sequence
LLIILRRRIRKQAHAHSK

SEQ ID NO: 893 - protein, 27 aa, Artificial sequence
  Synthetic sequence
GWTLNSAGYLLGKINLKALAALAKKIL

SEQ ID NO: 894 - protein, 18 aa, Artificial sequence
  Synthetic sequence
QLALQLALQALQAALQLA

SEQ ID NO: 895 - protein, 26 aa, Artificial sequence
  Synthetic sequence
DPKGDPKGVTVTVTVTVTGKGDPKPD

SEQ ID NO: 896 - protein, 24 aa, Artificial sequence
  Synthetic sequence
RRIRPRPPRLPRPRPRPLPFPRPG

SEQ ID NO: 897 - protein, 20 aa, Artificial sequence
  Synthetic sequence
HGLASTLTRWAHYNALIRAF

SEQ ID NO: 898 - protein, 30 aa, Artificial sequence
  Synthetic sequence
WEAALAEALAEALAEHLAEALAEALEALAA

SEQ ID NO: 899 - protein, 7 aa, Artificial sequence
  Synthetic sequence
PKKKRRV

SEQ ID NO: 900 - protein, 16 aa, Artificial sequence
  Synthetic sequence
KRPAATKKAGQAKKKK

SEQ ID NO: 901 - protein, 9 aa, Artificial sequence
  Synthetic sequence
PAAKRVKLD

SEQ ID NO: 902 - protein, 11 aa, Artificial sequence
  Synthetic sequence
RQRRNELKRSP

SEQ ID NO: 903 - protein, 25 aa, Artificial sequence
  Synthetic sequence
MSRRRKANPTKLSENAKKLAKEVEN

SEQ ID NO: 904 - protein, 9 aa, Artificial sequence
  Synthetic sequence
KLKIKRPVK

SEQ ID NO: 905 - protein, 38 aa, Artificial sequence
  Synthetic sequence
NQSSNFGPMKGGNFGGRSSGPYGGGGQYFAKPRNQGGY

SEQ ID NO: 906 - protein, 42 aa, Artificial sequence
  Synthetic sequence
RMRIZFKNKGKDTAELRRRRVEVSVELRKAKKDFQILKRRNV

SEQ ID NO: 907 - protein, 8 aa, Artificial sequence
  Synthetic sequence
VSRKRPRP

SEQ ID NO: 908 - protein, 8 aa, Artificial sequence
  Synthetic sequence
PPKKARED

SEQ ID NO: 909 - protein, 12 aa, Artificial sequence
  Synthetic sequence
SALIKKKKKMAP

SEQ ID NO: 910 - protein, 5 aa, Artificial sequence
  Synthetic sequence
DRLRR

SEQ ID NO: 911 - protein, 7 aa, Artificial sequence
  Synthetic sequence
PKQKKRK

SEQ ID NO: 912 - protein, 10 aa, Artificial sequence
  Synthetic sequence
RKLKKKIKKL

SEQ ID NO: 913 - protein, 10 aa, Artificial sequence
  Synthetic sequence
REKKKFLKRR

SEQ ID NO: 914 - protein, 20 aa, Artificial sequence
  Synthetic sequence
KRKGDEVDGVDEVAKKKSKK

SEQ ID NO: 915 - protein, 17 aa, Artificial sequence
  Synthetic sequence
RKCLQAGMNLEARKTKK

SEQ ID NO: 916 - protein, 7 aa, Artificial sequence
  Synthetic sequence
PPKKKPL

SEQ ID NO: 917 - RNA, 20 nt, Artificial sequence
  Synthetic sequence
gucaccuccaaugacuaggg

SEQ ID NO: 918 - RNA, 93 nt, Artificial sequence
  Synthetic sequence
guuuaagagcuaugcuggaaacagcauagcaaguuuaaauaaggcuaguccguuaucaacuugaaaaaguggcaccgagucggugcuuuuuuu

SEQ ID NO: 919 - RNA, 121 nt, Artificial sequence
  Synthetic sequence
guuuaagagcuauggaucauugcacuccgauccauagcaaguuuaaauaaggcuaguccguuaucaacuugcaauccauugcacuccggauugcaaguggcaccgagucggugcuuuuuuu

SEQ ID NO: 920 - RNA, 131 nt, Artificial sequence
  Synthetic sequence
guuuaagagcuauggaucauugcacuccgauccauagcaaguuuaaauaaggcuaguccguuaucaacuugaaaaaguggcaccgagucggugcaucaucgcgcugcauugcacuccgcagcgcuuuuuuu

SEQ ID NO: 921 - RNA, 143 nt, Artificial sequence
  Synthetic sequence
guuuaagagcuaugcuggaaacagcauagcaaguuuaaauaaggcuaguccguuaucaacuugcaauccauugcacuccggauugcaaguggcaccgagucggugcaucaucgcgcugcauugcacuccgcagcgcuuuuuuu

SEQ ID NO: 922 - RNA, 151 nt, Artificial sequence
  Synthetic sequence
guuuaagagcuauggaucauugcacuccgauccauagcaaguuuaaauaaggcuaguccguuaucaacuugcaauccauugcacuccggauugcaaguggcaccgagucggugcaucaucgcgcugcauugcacuccgcagcgcuuuuuuu

SEQ ID NO: 923 - RNA, 165 nt, Artificial sequence
  Synthetic sequence
guuuaagagcuaugcuggaaacagcauagcaaguuuaaauaaggcuaguccguuaucaacuugucgaggcuaagucgcauugcacuccgcgacagcacaagcccgcugccauugcacuccggcagcagggaacucgucaaguggcaccgagucggugcuuuuuuu

SEQ ID NO: 924 - RNA, 175 nt, Artificial sequence
  Synthetic sequence
guuuaagagcuaugcgaggcuaagucgcauugcacuccgcgacagcacaagcccgcugccauugcacuccggcagcagggaacucgcauagcaaguuuaaauaaggcuaguccguuaucaacuugcaauccauugcacuccggauugcaaguggcaccgagucggugcuuuuuuu

SEQ ID NO: 925 - RNA, 171 nt, Artificial sequence
  Synthetic sequence
guuuaagagcuauggaucauugcacuccgauccauagcaaguuuaaauaaggcuaguccguuaucaacuugcgaggcuaagucgcauugcacuccgcgacagcacaagcccgcugccauugcacuccggcagcagggaacucgcaaguggcaccgagucggugcuuuuuuu

SEQ ID NO: 926 - RNA, 173 nt, Artificial sequence
  Synthetic sequence
guuuaagagcuauggaucauugcacuccgauccauagcaaguuuaaauaaggcuaguccguuaucaacuugucgaggcuaagucgcauugcacuccgcgacagcacaagcccgcugccauugcacuccggcagcagggaacucgucaaguggcaccgagucggugcuuuuuuu

SEQ ID NO: 927 - RNA, 20 nt, Artificial sequence
  Synthetic sequence
aauccauugcacuccggauu

SEQ ID NO: 928 - RNA, 21 nt, Artificial sequence
  Synthetic sequence
aauccauucauguaccggauu

SEQ ID NO: 929 - RNA, 6 nt, Artificial sequence
  Synthetic sequence
gcacuc
